(19) United States
(12) Patent Application Publication
(10) Pub. No.: US 2017/0226598 A1
(43) Pub. Date: Aug. 10, 2017

(54) A BACILLUS METHYLOTROPHICUS STRAIN AND METHOD OF USING THE STRAIN TO INCREASE DROUGHT RESISTANCE IN A PLANT

(71) Applicant: THE ROYAL INSTITUTION FOR THE ADVANCEMENT OF LEARNING/MCGILL UNIVERSITY, MONTREAL (CA)

(72) Inventors: SUHA JABAJI, NOTRE-DAME-DE L'ILE PERROT (CA); FRANÇOIS GAGNÉ-BOURQUE, TROIS-RIVIÈRES (CA)

(21) Appl. No.: 15/328,274

(22) PCT Filed: Jul. 24, 2015
(86) PCT No.: PCT/CA2015/050699

§ 371 Date: Jan. 23, 2017

Related U.S. Application Data
(60) Provisional application No. 62/167,919, filed on May 29, 2015.
(60) Provisional application No. 62/130,263, filed on Mar. 9, 2015.
(60) Provisional application No. 62/028,578, filed on Jul. 24, 2014.

(51) Int. Cl. C12R 1/07; A01N 63/00; C12N 1/20

(52) U.S. Cl. CPC C12R 1/07; C12N 1/20; A01N 63/00

(57) ABSTRACT

A method of increasing drought resistance of a plant, the method comprising applying a Bacillus methylotrophicus or a composition thereof (i) to the plant or to a part of the plant; and/or (ii) to an area around the plant or plant part, in an amount effective to produce an increased drought resistance in the plant as compared to the drought stress resistance of the plant in the absence of said application of Bacillus methylotrophicus or composition, is described. A biologically pure culture of a 1-aminocyclopropane-1-carboxylate (ACC) deaminase deficient Bacillus methylotrophicus bacterium strain, or a mutant thereof able to induce drought resistance in a plant are also described.

### CROSS REFERENCE TO RELATED APPLICATIONS

[0001] This application is a PCT Application Serial No PCT/CA2015/* filed on Jul. 24, 2015 and published in English under PCT Article 21(2), which itself claims benefit of U.S. Provisional Application Ser. No. 62/028,578 filed on Jul. 24, 2014, U.S. Provisional Application Ser. No. 62/130,263 filed on Mar. 9, 2015, and U.S. Provisional Application Ser. No. 62/167,919 filed on May 29, 2015. All documents above are incorporated herein in their entirety by reference.

### STATEMENT REGARDING FEDERALLY SPONSORED RESEARCH OR DEVELOPMENT

[0002] N.A.

### FIELD

[0003] The disclosure relates to the use of a Bacillus methylotrophicus and a method for increasing drought resistance in a plant and to novel Bacillus methylotrophicus. In particular, embodiments of the present disclosure relate to the administration of Bacillus methylotrophicus to monocotyledonous plants to render them resistant to drought related stress. The resulting plants can be used in the production of human food crops, biofuels, biomass, and animal feed.

### REFERENCE TO SEQUENCE LISTING

[0004] Pursuant to 37 C.F.R. 1.821(c), a sequence listing is submitted herewith as an ASCII compliant text file named 11168_409_Seq_list_ST25.txt, that was created on Jul. 24, 2015 and having a size of ˜4.9 kilobytes. The content of the aforementioned file is hereby incorporated by reference in its entirety.

### BACKGROUND OF THE INVENTION

[0005] Plant growth-promoting bacteria (PGB) are mainly soil and rhizosphere-derived organisms that are able to colonize plant roots but with some having the ability of colonizing the internal tissues of plant organs. These are considered endophytes (Hardoim et al. 2008).

[0006] Irrespective of the mode of colonization, PGBs positively influence plant growth or reduce disease and abiotic stresses susceptibility through physical and chemical changes (Dimkpa, Weinand et al. 2009; Calvo, Nelson et al. 2014).

[0007] PGB mediated plant stress resistance have been reported in many studies and numerous genes induced by various stress conditions have been identified using molecular approaches (Timmusk and Wagner 1999; Zhang and Outlaw 2001; Sziderics, Rasche et al. 2007; Gagne-Bourque, Aliferis et al. 2013; Kasim, Osman et al. 2013; Gagné-Bourque, Mayer et al. 2015).

[0008] Rhizosphere microorganisms including PGBs are adapted to adverse conditions and may compensate for such detrimental conditions (Vivas, Marulanda et al. 2003; Marulanda, Barea et al. 2009; Marulanda, Azcón et al. 2010) and protect plants from the deleterious effects of drought thus increasing crop productivity under drought conditions. Endophytic bacteria may be even more important than rhizosphere bacteria, because they escape competition with rhizosphere microorganisms and achieve intimate contact with plant tissues. Several PGBs have been found to increase drought resistance in wheat, maize, lettuce, beans (Creus, Sueldo et al. 2004; Figueiredo, Burity et al. 2008; Marulanda, Barea et al. 2009; Vardharajula, Zulfikar Ali et al. 2011; El-Afry, El-Nady et al. 2012; Naveed, Mitter et al. 2014). A variety of mechanisms have been proposed behind microbial induced stress tolerance (IST) in plants (Yang, Kloepper et al. 2009). Some PGBs are known to promote root development thus improving the plant water absorption efficacy by extra production of the phytohormones, indole acetic acid (IAA), Gibberillic acid (GA), and cytokinins (Boiero, Perrig et al. 2007; Gagné-Bourque, Mayer et al. 2015).

[0009] Increase in total root system under stress conditions is the most commonly reported plant response mediated by PGB inoculation in various crops (Lucy, Reed et al. 2004; Wani and Khan 2010; Kasim, Osman et al. 2013). Investing more energy in developing a larger root system in order to optimize water extraction and minimizing water loss is a well-known drought avoidance mechanism by which plants manage to delay the consequence of drought (Chaves, Maroco et al. 2003; Meister, Rajani et al. 2014).

[0010] Others produce 1-aminocyclopropane-1-carboxylate (ACC) deaminase (Azevedo, Maccheroni Jr. et al.) that confers IST to drought stress in plants (Saleem, Arshad et al. 2007; Zahir, Munir et al. 2008) by reducing production of ethylene.

[0011] Studies on systemic tolerance to drought reported that inoculation with PGB enhanced drought tolerance via the increased transcription of drought-response genes (Sarma 2014), affecting the phytohormonal balance (Figueiredo et al. 2008) and sugar accumulation (Sandhya et al. 2010). Hence, some can induce modification in plant genes expression, increasing drought resistance associated gene like, ERD15 (Early Response to Dehydration 15) or DREB (Dehydration Responsive Element Protein) (Timmusk and Wagner 1999; Gagne-Bourque, Mayer et al. 2015).

[0012] PGB can induce metabolic adjustments leading to the modulation of several organic solutes like soluble sugars, starch and amino acids. More particularly, endophytes enhance drought and cold tolerance of tall fescue, maize and grapevine plants with higher and faster accumulation of stress-related metabolites (Vardharajula, Zulfikar Ali et al. 2011; Fernandez, Theocharis et al. 2012; Nagabhyru, Dinkins et al. 2013). Normally, soluble sugar content such as sucrose, glucose and fructose and raffinose, tends to be maintained or accumulated in the leaves of different droughted plants species (Spollen and Nelson 1994; Hare, Cress et al. 1998; Miazek, Bogdan et al. 2001; Taji, Ohsumi et al. 2002; Vardharajula, Zulfikar Ali et al. 2011; Bowne, Erwin et al. 2012). This is achieved at the expense of starch, which drastically declines (Chaves 1991). These sugars affect osmotic adjustment, and help in maintaining homeostasis allowing the plant to preserve its turgor pressure, thus normal function under water-limiting environment (Richardson, Chapman et al. 1992; Chaves, Maroco et al. 2003; Krasensky and Jonak 2012). In addition, these sugars help maintain the redox balance and act as reactive oxygen scavengers (Couée, Sulmon et al. 2006). Drought stress disrupts carbohydrate metabolism and sucrose level in leaves that spills over to decreased export rate, presumably due induced increased activity of acid invertase (Ruan, Jin et al. 2010). This may hamper the rate of sucrose export to the sink organs. During water stress, protein synthesis is slowed and hydrolysis may occur, promoting an increase in soluble nitrogen compounds such as amino acids (Farooq, Wahid et al. 2009; Krasensky and Jonak 2012). Levels of amino acids have been shown to increase in drought stressed plants (Bowne et al. 2012).

[0013] Several strains of Bacillus species, representing typical PGB colonize the rhizosphere and are reported to promote growth and enhance biotic and abiotic stress tolerance in a number of crops by exerting a number of characteristics enabling to mobilize soil nutrients and synthesize phytohormones without conferring pathogenicity ((Rodriguez and Fraga 1999; Saleem, Arshad et al. 2007; Van Loon 2007; Hardoim, van Overbeek et al. 2008; Ortiz-Castro, Valencia-Cantero et al. 2008; Niu, Liu et al. 2011; Wahyudi, Astuti et al. 2011; Truyens, Weyens et al. 2014; Lugtenberg and Kamilova 2009). The proposed mechanisms for plant growth promotion include increased nutrient availability, synthesizing plant hormones and production of volatiles (Ryu, Farag et al. 2003; Farag, Ryu et al. 2006). Considerable progress has been made in understanding the mechanisms underlying Bacillus-mediated tolerance to biotic stress, however, information on Bacillus strains mitigating abiotic stress symptoms is limited (Arkhipova, Prinsen et al. 2007; Ashraf and Foolad 2007; Vardharajula, Zulfikar Ali et al. 2011; Wolter and Schroeder 2012)) and the mechanisms underlying abiotic tolerance are largely elusive because most of the studies focus on evaluating plant growth promoting effects (Dimka et al. 2009).

[0014] Plants face various abiotic stresses among which drought is a major limiting factor both in growth and productivity of crops because it can elicit various biochemical and physiological reactions (Araus, Slaffer et al. 2002; Chaves, Maroco et al. 2003; Krasensky and Jonak 2012). Drought tolerance involves adaptation mechanism in which the plant produces osmolites and antioxidant molecules to help maintain cell turgor pressure, protect cellular macromolecules, membranes and enzyme from oxidative damage (Gill and Tuteja 2010; Krasensky and Jonak 2012). A correlation between drought tolerance and accumulation of compatible solutes such as carbohydrates, amino acids and ions to contribute to osmotic adjustments has been documented in grasses (Hanson and Smeekens 2009; Chen and Jiang 2010).

[0015] Adaptation to drought is an important acquirement of agriculturally relevant crops like food human crops and cool season grasses.

[0016] There is a need for alternative methods such as new PGBs conferring drought resistance to plants such as agriculturally relevant crops.

### SUMMARY OF THE INVENTION

[0017] The present invention provides the following items 1 to 27 and embodiments:

[0018] 1. A method of increasing drought resistance of a plant, the method comprising applying a Bacillus methylotrophicus or a composition thereof (i) to the plant or to a part of the plant; and/or (ii) to an area around the plant or plant part, in an amount effective to produce an increased drought resistance in the plant as compared to the drought stress resistance of the plant in the absence of said application of Bacillus methylotrophicus or composition.

[0019] 2. The method of item 1, wherein the Bacillus methylotrophicus exhibits one or more of (1) an ability to form sustaining endophytic populations in all tissues of the plant as well as in the rhizosphere; (2) an ability to avoid triggering the plant immune system; (3) an ability to reduce signs of wilting in the plant or increase survival time of the plant in drought conditions; (4) an ability to increase expression of at least one drought-responsive genes in the plant; (5) an ability to increase starch in the plant; (6) an ability to increase total soluble sugars in the plant; (7) an ability to increase DNA methylation in bacterized plant; (8) an ability to increase expression of at least one DNA methyltransferase in the plant; (9) an ability to maintain or increase crop biomass of the plant; (10) an ability to maintain or increase photosynthesis of the plant; (11) an ability to maintain or increase water conductance of the plant; (12) an ability to increase total amino acids content in roots and/or in shoots of the plant; (13) an ability to increase amino asparagine, glutamic acid and/or glutamine content in roots and/or in shoots of the plant; and (14) an ability to increase non-protein amino acid GABA in shoots and/or roots of the plant.

[0020] 3. The method of item 1 or 2, wherein the Bacillus methylotrophicus exhibits one or more of (3) an ability to reduce signs of wilting in the plant or increase survival time of the plant in drought conditions; (4) an ability to increase expression of at least one drought-responsive genes in the plant; (5) an ability to increase starch in the plant; (6) an ability to increase total soluble sugars in the plant; (7) an ability to increase DNA methylation in bacterized plant; (8) an ability to increase expression of at least one DNA methyltransferase in the plant; (9) an ability to maintain or increase crop biomass of the plant; (10) an ability to maintain or increase photosynthesis of the plant; (11) an ability to maintain or increase water conductance of the plant; (12) an ability to increase total amino acids content in roots and/or in shoots of the plant; (13) an ability to increase amino asparagine, glutamic acid and/or glutamine content in roots and/or in shoots of the plant; and (14) an ability to increase non-protein amino acid GABA in shoots and/or roots of the plant, under drought conditions.

[0021] 4. The method of any one of items 1 to 3, wherein the Bacillus methylotrophicus exhibits one or more of the characteristics (23) to (31) defined in Table 1.

[0022] 5. The method of any one of items 1 to 4, wherein the Bacillus methylotrophicus is 1-aminocyclopropane-1-carboxylate (ACC) deaminase deficient.

[0023] 6. The method of any one of items 1 to 5, wherein the plant is a poaceae plant.

[0024] 7. The method of item 6, wherein the poaceae plant is a food crop plant.

[0025] 8. The method of any one of items 1 to 7, wherein the amount effective is about 1×10⁸ CFU or more/plant, plant part, or area around a plant or plant part.

[0026] 9. The method of any one of items 1 to 8, wherein the Bacillus methylotrophicus is in a seed of a second generation plant infected with the Bacillus methylotrophicus.

[0027] 10. The method of any one of items 1 to 9, wherein the composition of Bacillus methylotrophicus comprises a polymer wherein said polymer is mixed and extruded with said Bacillus methylotrophicus in a proportion of 10 to 1.

[0028] 11. The method of item 10, where the polymer is pea protein and/or alginate.

[0029] 12. The method of any one of items 1 to 11, wherein the Bacillus methylotrophicus is of a strain comprising all of the biochemical characteristics of a Bacillus methylotrophicus deposited at the ATCC under accession no. * on Jul. 21, 2015, or a mutant thereof isolated from said strain and able to induce drought resistance to the plant.

[0030] 13. A biologically pure culture of a 1-aminocyclopropane-1-carboxylate (ACC) deaminase deficient Bacillus methylotrophicus bacterium strain, or a mutant thereof able to induce drought resistance in a plant.

[0031] 14. The Bacillus methylotrophicus bacterium strain, or mutant thereof of item 13, wherein the strain or mutant thereof exhibits one or more of (1) an ability to form sustaining endophytic populations in all tissues of the plant as well as in the rhizosphere; (2) an ability to avoid triggering the plant immune system; (3) an ability to reduce signs of wilting in the plant or increase survival time of the plant in drought conditions; (4) an ability to increase expression of at least one drought-responsive genes in the plant; (5) an ability to increase starch in the plant; (6) an ability to increase total soluble sugars in the plant; (7) an ability to increase DNA methylation in bacterized plant; (8) an ability to increase expression of at least one DNA methyltransferase in the plant; (9) an ability to maintain or increase crop biomass of the plant; (10) an ability to maintain or increase photosynthesis of the plant; (11) an ability to maintain or increase water conductance of the plant; (12) an ability to increase total amino acids content in roots and/or in shoots of the plant; (13) an ability to increase amino asparagine, glutamic acid and/or glutamine content in roots and/or in shoots of the plant; and (14) an ability to increase non-protein amino acid GABA in shoots and/or roots of the plant.

[0032] 15. The Bacillus methylotrophicus bacterium strain, or mutant thereof of item 13 or 14, wherein the strain or mutant exhibits one or more of (3) an ability to reduce signs of wilting in the plant or increase survival time of the plant in drought conditions; (4) an ability to increase expression of at least one drought-responsive genes in the plant; (5) an ability to increase starch in the plant; (6) an ability to increase total soluble sugars in the plant; (7) an ability to increase DNA methylation in bacterized plant; (8) an ability to increase expression of at least one DNA methyltransferase in the plant; (9) an ability to maintain or increase crop biomass of the plant; (10) an ability to maintain or increase photosynthesis of the plant; (11) an ability to maintain or increase water conductance of the plant; (12) an ability to increase total amino acids content in roots and/or in shoots of the plant; (13) an ability to increase amino asparagine, glutamic acid and/or glutamine content in roots and/or in shoots of the plant; and (14) an ability to increase non-protein amino acid GABA in shoots and/or roots of the plant, under drought conditions.

[0033] 16. The Bacillus methylotrophicus bacterium strain, or mutant thereof of any one of items 13 to 15, wherein the strain or mutant exhibits one or more of the characteristics (23) to (31) defined in Table 1.

[0034] 17. A biologically pure culture of a bacterium strain comprising all of the biochemical characteristics of a Bacillus methylotrophicus deposited at the ATCC under accession no. * on Jul. 21, 2015, or a mutant thereof isolated from said strain and able to induce drought resistance to a plant.

[0035] 18. A composition comprising a bacterium strain or mutant thereof as defined in any one of items 13 to 17, and at least one carrier.

[0036] 19. The composition of item 18, wherein the carrier comprises a polymer wherein said polymer is mixed and extruded with said bacterium strain or mutant thereof in a proportion of about 10 to about 1.

[0037] 20. The composition of item 19, where the polymer is pea protein and/or alginate.

[0038] 21. A seed coated with a bacterium strain or mutant thereof as defined in any one of items 13 to 17, or with a composition as defined in any one of items 18 to 20.

[0039] 22. A second or subsequent generation seed of a plant infected with bacterium strain or with a mutant thereof, the bacterium strain or a mutant thereof being as defined any one of items 13 to 17.

[0040] 23. A method of increasing a plant's growth, the method comprising applying a bacterium strain or mutant thereof as defined in any one of items 13 to 17, or a composition as defined in any one of items 18 to 20, (i) to the plant or to a part of the plant; and/or (ii) to an area around the plant or plant part in an amount effective to produce an increased plant growth as compared to the growth of the plant in the absence of said application of Bacillus methylotrophicus or composition.

[0041] 24. The method of item 23, wherein the plant is a poaceae plant.

[0042] 25. The method of item 23, wherein the poaceae plant is a food crop plant.

[0043] 26. The method of any one of items 23 to 25, wherein the amount effective is about 1×10⁸ CFU or more/plant, plant part, or area around a plant or plant part.

[0044] 27. The method of any one of items 23 to 25, wherein the bacterium strain or mutant thereof is in a seed of a second generation plant infected with the bacterium strain or mutant thereof.

[0045] An embodiment of the present invention provides a method of increasing salt stress resistance of a plant, the method comprising applying a composition comprising Bacillus methylotrophicus B26 to the plant, to a part of the plant and/or to an area around the plant or plant part in an amount effective to produce an increased salt stress resistance in the plant or the part of the plant, wherein the salt stress resistance comprises greater drought tolerance.

[0046] Another embodiment provides a method of increasing water stress resistance of a plant, the method comprising applying a composition comprising Bacillus methylotrophicus B26 to the plant, to a part of the plant and/or to an area around the plant or plant part in an amount effective to produce an increased water stress resistance in the plant, the part of the plant, wherein the water stress resistance leads to greater drought tolerance.

[0047] Still another embodiment provides a method of increasing water stress resistance of a plant, the method comprising applying a composition comprising Bacillus methylotrophicus B26 to the plant, to a part of the plant and/or to an area around the plant or plant part in an amount effective to produce an increased water stress resistance in the plant or the part of the plant, wherein the water stress resistance leads to greater drought tolerance, wherein the plant is selected from the group consisting of monocot plants.

[0048] Another embodiment provides a method of increasing water stress resistance of a plant, the method comprising applying a composition comprising Bacillus methylotrophicus B26 to the plant, to a part of the plant and/or to an area around the plant or plant part in an amount effective to produce an increased water stress resistance in the plant or the part of the plant, wherein the water stress resistance leads to greater drought tolerance, wherein the monocot plant is a biomass crop plant.

[0049] Another embodiment provides a method of increasing water stress resistance of a plant, the method comprising applying a composition comprising Bacillus methylotrophicus B26 to the plant, to a part of the plant and/or to an area around the plant or plant part in an amount effective to produce an increased water stress resistance in the plant or the part of the plant, wherein the water stress resistance leads to greater drought tolerance, wherein the monocot plant or the biomass crop plant is selected from the group consisting of switchgrass (Panicum virgatum), giant reed (Arundo donax), reed canarygrass (Phalaris arundinacea), Miscanthusxgiganteus, Miscanthus sp., Sericea lespedeza (Lespedeza cuneata), ryegrass (Lolium multiflorum, Lolium sp.), timothy (Phleum pretense), kochia (Kochia scoparia), turf grass, sunn hemp, kenaf, bahiagrass, bermudagrass, dallisgrass, pangolagrass, big bluestem, indiangrass, fescue (Festuca sp.) including tall fescue, Dactylis sp., Brachypodium distachyon, smooth bromegrass, orchardgrass and kentucky bluegrass.

[0050] Another embodiment provides a method of increasing growth of a plant, the method comprising applying a composition comprising Bacillus methylotrophicus B26 to the plant, to a part of the plant and/or to an area around the plant or plant part in an amount effective to produce an increased growth in the plant or the part of the plant, wherein the growth promoting effect leads to greater drymass, wherein the monocot plant or the biomass crop plant is selected from the group consisting of switchgrass (Panicum virgatum), giant reed (Arundo donax), reed canarygrass (Phalaris arundinacea), Miscanthus×giganteus, Miscanthus sp., Sericea lespedeza (Lespedeza cuneata), ryegrass (Lolium multiflorum, Lolium sp.), timothy (Phleum pretense), kochia (Kochia scoparia), turf grass, sunn hemp, kenaf, bahiagrass, bermudagrass, dallisgrass, pangolagrass, big bluestem, indiangrass, fescue (Festuca sp.) including tall fescue, Dactylis sp., Brachypodium distachyon, smooth bromegrass, orchardgrass or kentucky bluegrass.

[0051] Another embodiment provides a method of increasing water stress resistance of a plant, the method comprising applying a composition comprising Bacillus methylotrophicus B26 to the plant, to a part of the plant and/or to an area around the plant or plant part in an amount effective to produce an increased water stress resistance in the plant or the part of the plant, wherein the water stress resistance leads to greater drought tolerance, wherein the monocot plant or the biomass crop plant is selected from the group consisting of corn, rice, triticale, wheat, barley, oats, rye grass and millet.

[0052] Another embodiment provides a method of increasing growth of a plant, the method comprising applying a composition comprising Bacillus methylotrophicus B26 to the plant, to a part of the plant and/or to an area around the plant or plant part in an amount effective to produce an increased growth in the plant or the part of the plant, wherein the growth promoting effect leads to greater dry mass, wherein the monocot plant or the biomass crop plant is selected from the group consisting of corn, rice, triticale, wheat, barley, oats, rye grass and millet.

[0053] A further embodiment provides a method of increasing water stress resistance of a plant, the method comprising applying a composition comprising Bacillus methylotrophicus B26 to the plant, to a part of the plant and/or to an area around the plant or plant part in an amount effective to produce an increased water stress resistance in the plant or the part of the plant, wherein the water stress resistance leads to greater drought tolerance comprising administering the Bacillus methylotrophicus B26 composition in an amount effective to produce a drought resistant bacterized biomass crop plant prolonging its resistance to water from about * days to about * days compared to an non-bacterized biomass crop plant.

[0054] A further embodiment provides a method of increasing water stress resistance of a plant, the method comprising applying a composition comprising Bacillus methylotrophicus B26 to the plant, to a part of the plant and/or to an area around the plant or plant part in an amount effective to produce an increased salt stress resistance in the plant or the part of the plant, wherein the water stress resistance leads to greater drought tolerance comprising administering the Bacillus methylotrophicus B26 composition to the plant, to a part of the plant and/or to an area around the plant or plant part in an effective amount up to about 1×10⁸ CFU/plant, plant part, or area around a plant or plant part.

[0055] A further embodiment provides a method of increasing water stress resistance of a plant, the method comprising applying a composition comprising Bacillus methylotrophicus B26 to the plant, to a part of the plant and/or to an area around the plant or plant part in an amount effective to produce an increased water stress resistance in the plant or the part of the plant, wherein the water stress resistance leads to greater drought tolerance and wherein the composition comprises a seed of a second generation plant infected with the endophyte Bacillus methylotrophicus B26.

[0056] A further embodiment provides for a method of increasing water stress resistance to a plant, the method comprising applying a composition comprising Bacillus methylotrophicus and a material that forms a microsphere incorporating said Bacillus and wherein said material consists of a polymer that can be mixed with the bacteria at a proportion of 10:1 and both can be extruded as microspheres.

[0057] Another embodiment provides for a method of increasing water stress resistance to a plant, the method comprising applying microspheres consisting of bacteria and a polymer, wherein the polymer is selected from the group of alginate and pea protein.

[0058] Another embodiments provides for a method of increasing water stress resistance to a plant, the method comprising applying microspheres consisting of bacteria and a polymer, wherein the microspheres can be freeze dried after which said microspheres can be stored at either −15 C, 4 C or 22 C.

[0059] A further embodiment provides for a method of increasing water stress resistance to a plant wherein microspheres containing Bacillus methylotrophicus B26 are applied at the time of planting or seeding and where a continuously high level of Bacillus subtilis B26 in the soil can be achieved by reapplication on already planted plants.

[0060] According to another aspect of the present invention, there is provided a method for increasing the ability of a bacterial strain to induce drought resistance in a plant comprising interspecific (i.e. between the bacterial species of the present invention and another bacterial species of the Firmicutes phylum. In a more specific embodiment, the Firmicutes phylum bacterium is a Bacilli. In another embodiment, the Bacilli bacterium is a Bacillales. In a more specific embodiment, the Bacillales is a Bacillaceae. In a more specific embodiment, the Bacillaceae bacterium is a Bacillus spp.) or intraspecific protoplasm fusion of the bacterial strain with a bacterial strain of the present invention (e.g., a Bacillus methylotrophicus strain as defined herein such as B26 or a mutant thereof as defined herein able to induce drought resistance in a plant). In a more specific embodiment, the protoplasm fusion is intraspecific (between the bacterium of the present invention and another Bacillus methylotrophicus). Drought resistance traits can be conferred from one species to another by protoplast fusion (Hennig et al. 2015). Protoplasm fusion has been used between to transfer traits between bacteria. (Ran et al. 2013; Agbessi et al. 2003).

[0061] According to another aspect of the present invention, there is provided a method for increasing the ability of a bacterial strain to increase a plant's growth comprising interspecific as defined above or intraspecific protoplasm fusion of the bacterial strain with a bacterial strain of the present invention (e.g., a Bacillus methylotrophicus strain as defined herein such as B26 or a mutant thereof as defined herein able to induce drought resistance in a plant). In a more specific embodiment, the protoplasm fusion is intraspecific (between the bacterium of the present invention and another Bacillus methylotrophicus.

[0062] Other objects, advantages and features of the present invention will become more apparent upon reading of the following non-restrictive description of specific embodiments thereof, given by way of example only with reference to the accompanying drawings.

### BRIEF DESCRIPTION OF THE FIGURES

[0063] FIG. 1 shows that the inoculation of Bacillus methylotrophicus strain B26 improved production of biomass and seeds in Brachypodium distachyon plants. Plants were visually compared as bacterized plants and non-bacterized plants. Initial tests involved culture dependent tests, such as the determination of colony forming units of endophytes, culture independent methods, such as quantitative PCR, and agronomic measurements, such as biomass.

[0064] FIG. 2 shows the comparison in plant growth between bacterized and non-bacterized Brachypodium distachyon plants in terms of total plant height (A), shoot dry biomass (B), root drymass (C), number of leaves (D), and number of seeds (E). (F) presents a photographic comparison of bacterized and non-bacterized Brachypodium distachyon whole plants.

[0065] FIG. 3 shows the comparison of number of seed heads (A) and number of spikelets (B) generated in Brachypodium non-bacterized (non-inoculated) and bacterized (inoculated) with B. methylotrophicus strain B26.

[0066] FIG. 4 shows the detection of B. methylotrophicus B26 by PCR in different tissues using species-specific primers. Lane 1: pure B. methylotrophicus B26; Lane 2: no template control; Lanes 3 to 5: non-bacterized plant tissues at D63 of root, shoot and seed, respectively; Lanes 6 to 8: bacterized plant tissues at D63 of root, shoot, seed, respectively; and Lanes 9 to 10: plant tissue of second generation bacterized plants at D28 of root and shoot, respectively.

[0067] FIG. 5 shows the relative transcript accumulation of PR1-like gene, a marker of immune response, in bacterized (inoculated) and non-bacterized (non-inoculated) plants from 0 to 168 hours post inoculation with B. methylotrophicus strain B26 (A) or Brachypodium distachyon Bd21 plants treated or not with Salicylic Acid (SA) (B).

[0068] FIG. 6 shows the methodology used to subject Brachypodium distachyon to chronic water stress for results presented herein.

[0069] FIG. 7 shows the relative transcript accumulation of drought-responsive genes. The relative mRNA abundance of DREB2B-like (A, B), DHN3-like (C, D) and LEA-14-A-like (E, F) in non-bacterized (non-inoculated) and bacterized (inoculated) Brachypodium plants before and 90 mins after uprooting (A, C, E) (acute drought stress) or before and after five and eight days of chronic drought stress (B, D, F) are depicted. * represent a statistically significant difference.

[0070] FIG. 8 shows transmission electron microscopy (TEM) micrographs of colonized Brachypodium tissues with B. methylotrophicus B26. (A). Cross section of root xylem with numerous bacterial cells present inside the vessel elements (arrows). (B, C). Leaf mesophyll cells and bundle sheath (inset) with bacterial cells (arrows). (D). Vessel elements of xylem stem tissue showing B26 in and outside the vessel elements. (E). Cross section of seed with B26 cells. (F). Cross section of chloroplast of a leaf bundle sheath cell from a colonized leaf. Notice the abundance of starch granules (“S” in panel) and the integrity of the thylakoids. (G). B. methylotrophicus B26 cells grown in pure culture.

[0071] FIG. 9 shows effects of drought stress on non-bacterized and bacterized Brachypodium plants. Non-bacterized (left) and bacterized (right) Brachypodium plants (A) before or (B and C) after one and two hours of acute drought stress. Pictures of non-bacterized (left) and bacterized (right) Brachypodium plants were also taken at (E) 0 day, (F) 5 days and (G) 8 days after last watering.

[0072] FIG. 10 shows soluble sugars and starch concentrations of bacterized (inoculated) and non-bacterized (non-inoculated) plants under control and drought conditions. (A) 5 days and (B) 8 days post watering * Represent a statistically significant difference.

[0073] FIG. 11 shows global DNA methylation variations in bacterized (inoculated) and non-bacterized (non-inoculated) Brachypodium plants under control and drought conditions. (A) Before and after one hour (1H) of acute drought stress. (B) Before and after five (D5) and eight (D8) days of chronic drought stress. * Represent a statistically significant difference.

[0074] FIG. 12 shows relative transcript accumulation of DNA methyltransferases in bacterized (inoculated) and non-bacterized (non-inoculated) Brachypodium plants under control and drought conditions. Relative mRNA abundance of methyltransferases 1-like (MET1B-like) (A, B), chromomethylase 3-like (CMT3-like) (C, D) and domains-rearranged methyltransferases 2-like (DRM2-like) (E, F) before and 90 mins after (from left to right respectively) uprooting non-bacterized (non-inoculated) and bacterized (inoculated) plants (A, C, E) or before and after five and eight days (from left to right respectively) after last watering of non-bacterized (non-inoculated) and bacterized (inoculated) plants (B, D, F). * Represent a statistically significant difference.

[0075] FIG. 13 shows the increase in plant growth of bacterized (inoculated) plants compared to non-bacterized (non-inoculated) plants, namely wheat (A), barley (B), and oat (C). Panel D summarizes the respective dry biomass of A, B, and C.

[0076] FIG. 14 shows the increase in plant growth of bacterized (inoculated) plants compared of non-bacterized (non-inoculated) plants, namely reed Canary grass (A), Smooth Bromegrass (B) and Timothy (C). Panel D summarizes the respective dry biomass of A, B, C.

[0077] FIG. 15 shows a formulation of Bacillus methylotrophicus B26 in microbeads, i.e. pea protein isolate-alginate microspheres prepared via extrusion of a suspension comprising a bacteria to polymer ratio of 1:10 (v/v) (A). Panels B1 to B3 represent a Scanning Electron Microscopy (SEM) image at different levels of magnification. B-1 shows the outside surface of a microbead, B-2 shows the incorporation of Bacillus methylotrophicus B26 spores (arrows), and B-3 shows the inside of a microsphere including Bacillus methylotrophicus B26 spores (arrows). Panel C shows microbeads used for the inoculation of plants as further described in FIG. 17.

[0078] FIG. 16 shows the survival rates of free Bacillus methylotrophicus B26 cells (A) and of encapsulated B. methylotrophicus B26 cells (B) under different temperature conditions. * represents a statistically significant difference.

[0079] FIG. 17 shows the effect of Bacillus methylotrophicus B26 loaded microspheres on Brachypodium and timothy plants with a pre-inoculation or pre-planting treatment and with a post-inoculation or post-planting treatment including non-inoculated controls. Panel A provides a visual comparison of the bacterized (inoculated) and non-bacterized (non-inoculated) Brachypodium plants obtained with the pre-inoculation or pre-planting treatment and with a post-inoculation or post-planting treatment. Panel B shows the concentration of Bacillus methylotrophicus B26 in top soil over the period of 56 days when Bacillus methylotrophicus B26 loaded microspheres are applied to topsoil at the time of seeding Brachypodium or timothy, i.e. according to the pre-inoculation or pre-planting treatment mode. Panel C shows the concentration of Bacillus methylotrophicus B26 in top soil over the period of 35 days when Bacillus methylotrophicus B26 loaded microspheres are applied to topsoil when Brachypodium or timothy plants have reached an age of 21 days according to the post-inoculation or post-planting treatment mode.

[0080] FIG. 18 shows a flow chart of the experimental set-up of non-inoculated (NI) and inoculated (I) timothy grass with Bacillus methylotrophicus B26 grown under well-watered (WW) and stress conditions (DRY). WSP=Weeks post seeding and W=Weeks. H=Harvest date.

[0081] FIG. 19 summarizes dry mass of shoot and root (A, B), photosynthesis (C, D) and water conductance (E, F) of timothy grass inoculated (endophyte) or not (non-endophyte) with B. methylotrophicus B26 after 4 (harvest 1) (A, C, E) and 8 (harvest 2) (B, D, F) weeks of withholding water. *=Represents a statistically significant difference. All statistical analyses were performed by one-way ANOVA. The significance of the effect of the treatments was determined via Tukey HSD with a magnitude of the F-value (P=0.05). Harvest 1 (4 weeks of withholding water) and Harvest 2 (8 weeks of withholding water) β were analyzed separately.

[0082] FIG. 20 shows the dynamics of B. methylotrophicus B26 in soil and in timothy grass under well-watered (WW) and stress conditions (DRY). (A) Colony forming units (CFU) number estimated in rhizosphere soil, shoot and root tissues after 4 weeks (Harvest 1) and 8 weeks (Harvest 2) of withholding water. (B) Copy number of B. methylotrophicus B26 in shoot and root tissues of timothy exposed to 4 weeks (Harvest 1) and 8 weeks of stress (Harvest 2). (C) Copy number of DNA of strain B26 estimated in fresh weight in different tissues using species-specific primers. Lane +, B. methylotrophicus B26 pure DNA; Lane −, no template; Lanes 1, 3, 5, 7, 9, 11, 13 and 15 represent inoculated plant tissues of root and shoot. Lanes 2, 4, 6, 8, 10, 12, 14 and 16 represent non-inoculated plant tissues of root and shoot.

[0083] FIG. 21 depicts a multivariate analysis of Harvest 1 (A) and Harvest 2 (B). Projections to latent structures-discriminant analysis (OPLS-DA) score plot. The ellipse represents the Hotelling T² with 95% confidence interval. Four biological replications each consisting of ten plants were performed per treatment (Q²(cum); cumulative fraction of the total variation of the X's that can be predicted y the extracted components, R²X and R²Y; the fraction of the sum of squares of all X's and Y's explained by the current component, respectively).

[0084] FIG. 22 shows a discriminant analysis (OPLS-DA) coefficient plot for selected influential factors for the observed separation between the inoculated and non-inoculated under water stressed conditions (DRY) (A) and well-watered (WW) (B) after 4 weeks of withholding water (Harvest 1) displayed with a jack-knifed confidence intervals (P=0.05). List of abbreviation: Ala=alanine, Arg=arginine, Asn=asparagine, Asp=aspartic acid, Gln=glutamine, Glu=glutamic acid, Gly=glycine, His=histidin, Ile=isoleucine, Leu=leucine, Lys=leucine, Lys=lysine, Met=methionine, Phe=phenylalanine, Pro=proline, Ser=serine, Thr=threonine, Tyr=tyrosine, Val=valine, Orn=Ornithine, AA_TOT=Total amino acid, SSTot=Total soluble sugars, CHOTOT=total carbohydrate, AABA=α-aminobutyric acid, HPM=fructan, GABA=γ-aminobutyric acid, items labeled with R refer to their presence in Roots, Items labelled with L refer to their presence in Leaves and shoots. Metabolites increased in the inoculated plant appear on the left side of each panel.

[0085] FIG. 23 shows a discriminant analysis (OPLS-DA) coefficient plot for selected influential factors for the observed separation between the inoculated and non-inoculated under water stressed conditions (DRY) (A) and well-watered (WW) (B) after 8 weeks of withholding water (Harvest 2) displayed with a jack-knifed confidence intervals (P=0.05). List of abbreviation: Ala=alanine, Arg=arginine, Asn=asparagine, Asp=aspartic acid, Gln=glutamine, Glu=glutamic acid, Gly=glycine, His=histidin, Ile=isoleucine, Leu=leucine, Lys=leucine, Lys=lysine, Met=methionine, Phe=phenylalanine, Pro=proline, Ser=serine, Thr=threonine, Tyr=tyrosine, Val=valine, Orn=Ornithine, AATOT=Total amino acid, SSTOT=Total soluble sugars, CHOTOT=total carbohydrate, AABA=α-aminobutyric acid, HPM=fructan, GABA=γ-aminobutyric acid, items labeled with R refer to their presence in Roots, Items labelled with L refer to their presence in Leaves and shoots. Metabolites increased in the inoculated plant appear on the left side of each panel.

[0086] FIG. 24 depicts a metabolic pathway map of inoculated timothy plants after 4 and 8 weeks of withholding water. Fluctuation in the inoculated timothy metabolic pathway leading to amino acid production of shoot (A) and root (B) tissues of bacterized timothy at harvest 1 and 2. Variable relative concentrations are coded using a color based on the means of scaled and centered OPLS regression coefficients (CoeffCS) from 4 biological replications. Dashed lines symbolize a multistep and solid lines one-step reactions. List of abbreviation: AATOT=Total amino acid, SSTOT=Total soluble sugars, CHOTOT=total carbohydrate AABA=α-aminobutyric acid, GABA=γ-aminobutyric acid.

[0087] FIG. 25 summarizes soil moisture (A) and water potential (kPa) (B) of bacterized (Inoculated) or not (Non-inoculated) timothy plants with strain B26 and exposed or not to water stress after 4 (H1) and 8 weeks (H2).

[0088] FIG. 26 shows a principal component analysis PC1/PC2 score plots of (A) Inoculated and non-inoculated. (B) Well-watered (WW) and dry (DRY) treatment and (C) harvest 1 (H1) and harvest 2 (H2).

[0089] FIG. 27 shows the lack of ACC deaminase gene by PCR analysis in B. methylotrophicus B26 using ACC1 and ACC2 primer sets. Panel A shows: Lane + B. methylotrophicus B26 DNA using B26 specific primer set; Λ 100 bp DNA ladder from FroggaBio; Lane − No template DNA on B26 specific primer set; Lane 1 B. methylotrophicus B26 DNA using ACC1 primer set; Lane 2 No template DNA using ACC1 primer set; Lane 3 B. methylotrophicus B26 DNA using ACC2 primer set; Lane 4 No template DNA using ACC2 primer set. Panel B shows a PCR analysis using the following primers: Lane + B. methylotrophicus B26 DNA using B26 specific primer set; Lane − No template DNA on B26 specific primer set; Lane 1 B. methylotrophicus B26 DNA using ACC3 primer set; Lane 2 No template DNA using ACC3 primer set; Lane 3 B. methylotrophicus B26 DNA using ACC_general primer set; and Lane 4 No template DNA using ACC_general primer set.

[0090] FIG. 28 shows the lack of growth of B. methylotrophicus in broth and on agar plates with ACC as single nitrogen source.

### DETAILED DESCRIPTION OF THE INVENTION

### General Definitions

[0091] Headings, and other identifiers, e.g., (a), (b), (i), (ii), etc., are presented merely for ease of reading the specification and claims. The use of headings or other identifiers in the specification or claims does not necessarily require the steps or elements be performed in alphabetical or numerical order or the order in which they are presented.

[0092] In the present description, a number of terms are extensively utilized. In order to provide a clear and consistent understanding of the specification and claims, including the scope to be given such terms, the following definitions are provided.

[0093] The use of the word “a” or “an” when used in conjunction with the term “comprising” in the claims and/or the specification may mean “one” but it is also consistent with the meaning of “one or more”, “at least one”, and “one or more than one”. Throughout this specification, unless the context requires otherwise, the words “comprise,” “comprises” and “comprising” will be understood to imply the inclusion of a stated step or element or group of steps or elements but not the exclusion of any other step or element or group of steps or elements.

[0094] Throughout this application, the term “about” is used to indicate that a value includes the standard deviation of error for the device or method being employed to determine the value. In general, the terminology “about” is meant to designate a possible variation of up to 10%. Therefore, a variation of 1, 2, 3, 4, 5, 6, 7, 8, 9 and 10% of a value is included in the term “about”. Unless indicated otherwise, use of the term “about” before a range applies to both ends of the range.

[0095] As used in this specification and claim(s), the words “comprising” (and any form of comprising, such as “comprise” and “comprises”), “having” (and any form of having, such as “have” and “has”), “including” (and any form of including, such as “includes” and “include”) or “containing” (and any form of containing, such as “contains” and “contain”) are inclusive or open-ended and do not exclude additional, un-recited elements or method steps.

[0096] As used herein, the term “consists of” or “consisting of” means including only the elements, steps, or ingredients specifically recited in the particular claimed embodiment or claim.

[0097] Terms and symbols of genetics, molecular biology, biochemistry and nucleic acid used herein follow those of standard treatises and texts in the field, e.g. Kornberg and Baker, DNA Replication, Second Edition (W.H. Freeman, New York, 1992); Lehninger, Biochemistry, Second Edition (Worth Publishers, New York, 1975); Strachan and Read, Human Molecular Genetics, Second Edition (Wiley-Liss, New York, 1999); Eckstein, editor, Oligonucleotides and Analogs: A Practical Approach (Oxford University Press, New York, 1991); Gait, editor, Oligonucleotide Synthesis: A Practical Approach (IRL Press, Oxford, 1984); and the like. All terms are to be understood with their typical meanings established in the relevant art.

[0098] The present invention concerns nonpathogenic Bacillus methylotrophicus (illustrated by a Bacillus, which is now identified as a Bacillus methylotrophicus strain B26 submitted at the ATCC under accession number * filed Jul. 21, 2015) and mutants thereof displaying drought resistance, and, in more specific embodiments, plant growth enhancing activities.

[0099] A mutant of the B26 strain deposited at the ATCC under access no * may or may not have the same identifying biological characteristics of the B26 strain, as long as it can induce drought resistance in plants that it colonizes. Illustrative examples of suitable methods for preparing mutants of the microorganism of the present invention (i.e. Bacillus methylotrophicus) include, but are not limited to: interspecific or intraspecific protoplast fusion according to the CRISPR-Cas9 method (Ran et al. 2013); mutagenesis by irradiation with ultraviolet light or X-rays; or by treatment with a chemical mutagen such as nitrosoguanidine (N-methyl-N′-nitro-N-nitrosoguanidine), methylmethane sulfonate, nitrogen mustard and the like; gene integration techniques, such as those mediated by insertional elements or transposons or by homologous recombination of transforming linear or circular DNA molecules; and transduction mediated by bacteriophages such as P1. These methods are well known in the art and are described, for example, in J. H. Miller, Experiments in Molecular Genetics, Cold Spring Harbor Laboratory Press, Cold Spring Harbor, N.Y. (1972); J. H. Miller, A Short Course in Bacterial Genetics, Cold Spring Harbor Laboratory Press, Cold Spring Harbor, N.Y. (1992); M. Singer and P. Berg, Genes & Genomes, University Science Books, Mill Valley, C A (1991); J. Sambrook, E. F. Fritsch and T. Maniatis, Molecular Cloning: A Laboratory Manual, 2d ed., Cold Spring Harbor Laboratory Press, Cold Spring Harbor, N.Y. (1989); P. B. Kaufman et al., Handbook of Molecular and Cellular Methods in Biology and Medicine, CRC Press, Boca Raton, Fla. (1995); Methods in Plant Molecular Biology and Biotechnology, B. R. Glick and J. E. Thompson, eds., CRC Press, Boca Raton, Fla. (1993); and P. F. Smith-Keary, Molecular Genetics of Escherichia coli, The Guilford Press, New York, N.Y. (1989).

[0100] Mutant strains derived from the B26 strain using known methods are then preferably selected or screened for ability to induce drought resistance to plants.

[0101] The current screening assay for drought resistance inducing bacteria involves determining the bacteria's ACC deaminase activity, as the latter is generally considered essential for drought resistance. The Bacillus methylotrophicus of the present invention are however ACC deaminase deficient. Mutants can be selected by methods described in Examples herein.

[0102] Additional useful Bacillus methylotrophicus of the present invention may be identified or defined as exhibiting one or more one or more (two or more; three or more; four or more; five or more, six of more, seven or more, eight or more, nine or more, ten or more, eleven or more, twelve or more, thirteen or more or fourteen) of the following characteristics: (1) ability to form sustaining endophytic populations in all bacterized plant tissues as well as in the rhizosphere (e.g., following methods as described in Examples 1, 3, 16 and 18); (2) ability to avoid triggering the plant immune system (e.g., following methods as described in Examples 1 and 4); (3) ability to reduce signs of wilting of a bacterized plant or increase survival time of the plant in drought conditions (e.g., following methods as described in Examples 5, 6, 16 and 17); (4) increase expression of at least one (at least two or at least three) drought-responsive genes such DREB2B, LEA-14, and DHN3 in a bacterized plant subjected to drought conditions or in well-watered conditions (e.g., following methods as described in Examples 5 and 7); (5) ability to increase starch in bacterized plant subjected to drought conditions or well-watered conditions (e.g., following methods as described in Examples 5, 9 and 22-24); (6) ability to increase total soluble sugars in bacterized plant subjected to drought conditions or well-watered conditions (e.g., following methods as described in Examples 5, 9, 16 and 20); (7) ability to increase DNA methylation in bacterized plant subjected to drought conditions or well-watered conditions (e.g., following methods as described in Examples 5 and 10); (8) ability to increase expression of at least one (or at two or at least three) DNA methyltransferase(s) (e.g., MET1, CMT3 and DRM2) in bacterized plants subjected to drought conditions or well-watered conditions (e.g., following methods as described in Examples 5 and 11); (9) ability to maintain or increase crop biomass of bacterized plants subjected to drought conditions or well-watered conditions (e.g., following methods as described in Examples 1-2, 12-13 and 16-17); (10) ability to maintain or increase photosynthesis of bacterized plants subjected to drought conditions or well-watered conditions (e.g., following methods as described in Examples 16-17); (11) ability to maintain or increase water conductance of bacterized plants subjected to drought conditions or well-watered conditions (e.g., following methods as described in Examples 16-17); (12) ability to increase total amino acids content in roots and/or in shoots of bacterized plants subjected to drought conditions or well-watered conditions (e.g., following methods as described in Examples 16 and 21-28); (13) ability to increase specific amino acids content (e.g. asparagine, the precursors of proline, glutamic acid and/or glutamine) in roots and/or in shoots of bacterized plants subjected to drought conditions or well-watered conditions (e.g., following methods as described in Examples 16 and 21-28); and (14) ability to increase non-protein amino acid GABA in shoots exposed to stress and roots of stressed and not stressed plants (e.g., following methods as described in Examples 16 and 21-28). The increased in characteristics (3) to (14) are as compared to the corresponding characteristic(s) in a non-bacterized plant (i.e. not bacterized with a bacterium of the present invention). In specific embodiments, the Bacillus methylotrophicus is ACC deaminase deficient.

[0103] Additional useful Bacillus methylotrophicus of the present invention may further be identified or defined as exhibiting one or more (two or more; three or more; four or more; five or more, six of more, seven or more, or eight) of the following additional characteristics: (15) ability to increase height of bacterized plant (e.g., following methods as described in Examples 1 and 2); (16) ability to increase root and/or shoot dry weight of bacterized plant (e.g., following methods as described in Examples 1 and 2); (17) ability to increase number of seeds of bacterized plant (e.g., following methods as described in Examples 1 and 2); (18) ability to increase number of spikelets of bacterized plant (e.g., following methods as described in Examples 1 and 2); (19) ability to increase number of leaves of bacterized plant; (20) ability to increase total tiller number of bacterized plant; (21) ability to increase ratio of reproductive tiller/total tiller; and (22) ability to increase chlorophyll content leading to darker leaves of bacterized plant. The increase in characteristics (15) to (22) are as compared to the corresponding characteristic(s) in a non-bacterized plant (i.e. not bacterized with a bacterium of the present invention).

[0104] Additional useful Bacillus methylotrophicus of the present invention may be identified or defined as a bacterium resulting from the intraspecific protoplasm fusion of the Bacillus methylotrophicus B26 or a mutant thereof isolated from said strain and able to induce drought resistance to a plant, with another Bacillus methylotrophicus.

[0105] Additional useful Bacillus methylotrophicus of the present invention may further be identified or defined as exhibiting one or more of the following additional characteristics, namely the ability to express one or more (two or more; three or more; four or more; five or more, six of more or seven) of the following metabolites:

TABLE 1
Metabolites identified in the supernatant of Bacillus methylotrophicus B26.

| | Chemical | Monisotopic | KEGG | KEGG | |
|---|---|---|---|---|---|
| Compound | formula | Mass | ID | pathways | Structure |
| (23) Indole-3- acetate | C₁₀H₉NO₂ | 175_0633 | C00954 | ko00380 Tryptophan metabolism, ko04075 Plant hormone signal transduction | [chemical structure] |
| (24) Methyl- indole-3- acetate | C₄₅H₆₈N₁₀O₁₅ | 189_079 | NA | NA | [chemical structure] |
| (25) Bacillomycin- D (iturin) | C₄₅H₆₈N₁₀O₁₅ | 988_4866 | C12267 | ko01054 Nonribosomal peptide structures | [chemical structure] |
| (26) Iturin D | C₄₈H₇₄N₁₂O₁₄ | 1042_5447 | NA | NA | [chemical structure] |
| (27) Iturin E Mycobacillin | C₄₉H₇₅N₁₁O₁₅ C₆₅H₈₅N₁₃O₃₀ | 1057_544 1527_5525 | NA NA | NA NA | [chemical structure] |
| (28) Surfactin C13 | C₅₁H₈₉N₇O₁₃ | 1007_6518 | NA | NA | [chemical structure] |
| (29) Surfactin C14 | C₅₂H₉₁N₇O₁₃ | 1021_6675 | NA | NA | [chemical structure] |
| (30) Surfactin C15 | C₅₃H₉₃N₇O₁₃ | 1035_6831 | C12043 | ko01054 Nonribosomal peptide structures | [chemical structure] |
| (31) Pyridines Zeatin riboside | C₁₅H₂₁N₅O₅ | 351_1543 | C16431 | ko00908 Zeatin biosynthesis | [chemical structure] |

[0106] In a specific embodiment, useful Bacillus methylotrophicus of the present invention are identified or defined as exhibiting one or more one or more (two or more; three or more; four or more; five or more, six of more, seven or more, eight or more, nine or more, ten or more, eleven or more or twelve) of the characteristics (3) to (14) defined above. In a specific embodiment, useful Bacillus methylotrophicus of the present invention are identified or defined as exhibiting one or more one or more (two or more; three or more; four or more; five or more, six of more, seven or more, eight or more, nine or more, ten or more, eleven or more or twelve) of the characteristics (3) to (14) defined above. In a specific embodiment, useful Bacillus methylotrophicus of the present invention are identified or defined as exhibiting one or more one or more (two or more; three or more; four or more; five or more, six of more, seven or more, eight or more, nine or more, ten or more, eleven or more or twelve) of the characteristics (3) to (14) defined above under drought conditions.

[0107] As used herein, the term “increase” or “decrease” in the context of either one of the characteristics (3) to (22) below refer to an increase or decrease, respectively of at least 5% (higher or lower, respectively) as compared to a reference characteristic in a non-bacterized plant (e.g., that of the plant in the absence of the bacterium of the present invention). In an embodiment, the increase or decrease, respectively, is of at least 10% (higher or lower, respectively), in a further embodiment, at least 15% (higher or lower, respectively), in a further embodiment, at least 20% (higher or lower, respectively), in a further embodiment of at least 30% (higher or lower, respectively), in a further embodiment of at least 40% (higher or lower, respectively), in a further embodiment of at least 50% (higher or lower, respectively), in a further embodiment of at least 60% (higher or lower, respectively), in a further embodiment of at least 70% (higher or lower, respectively), in a further embodiment of at least 80% (higher or lower, respectively), in a further embodiment of at least 90% (higher or lower, respectively), in a further embodiment of 100% (higher or lower, respectively).

[0108] Additional useful Bacillus methylotrophicus of the present invention include Bacillus methylotrophicus comprising any one of SEQ ID NOs: 1-26 (i.e. genomic sequences of the Bacillus methylotrophicus B26 strain) or 45 (16s rRNA). 16S rRNA gene sequences contain hypervariable regions that can provide species-specific signature sequences useful for identification of bacteria. In a specific embodiment, the useful Bacillus methylotrophicus of the present invention include a Bacillus methylotrophicus expressing an RNA as defined in SEQ ID NO: 45 or an sRNA substantially identical to said sequence. Additional useful Bacillus methylotrophicus of the present invention include a Bacillus methylotrophicus comprising expressing a polypeptide encoded by an exon defined by any one of SEQ ID NOs: 1-26. In another embodiment, the Bacillus methylotrophicus expresses a polypeptide that is substantially identical as that of SEQ ID NOs: 1-26. “Substantially identical” as used herein refers to polypeptides or RNAs having at least 60% of similarity, in embodiments at least 65%, 70%, 75%, 80%, 85%, 90%, 91%, 92%, 93%, 94%, 95%, 96%, 97%, 98% or 99% of similarity in their amino acid sequences. In further embodiments, the polypeptides have at least 60%, 70%, 75%, 80%, 85%, 90%, 91%, 92%, 93%, 94%, 95%, 96%, 97%, 98% or 99% of identity in their amino acid sequences (for polypeptides) or nucleotide sequences (for RNAs). In specific embodiments, the Bacillus methylotrophicus is ACC deaminase deficient.

[0109] As used herein the terms “drought conditions” refer to the set of environmental conditions under which a plant will begin to suffer the effects of water deprivation, such as decreased stomatal conductance and photosynthesis, decreased growth rate, loss of turgor (wilting), significant reduction in biomass and yield or ovule abortion. Plants experiencing drought stress typically exhibit a significant reduction in biomass and yield. Water deprivation may be caused by lack of rainfall or limited irrigation. Alternatively, water deficit may also be caused by high temperatures, low humidity, saline soils, freezing temperatures or water-logged soils that damage roots and limit water uptake to the shoot. Since plant species vary in their capacity to tolerate water deficit, the precise environmental conditions that cause drought stress cannot be generalized. Limited availability of water or drought is to be understood as a situation wherein water is or may become a limiting factor for biomass accumulation or crop yield for a non-drought resistant plant (e.g., non-bacterized plant) grown under such condition. For a plant obtained according to a method according to the present invention and grown under said condition, water may not, or to a lesser degree, be a limiting factor.

[0110] As used herein the terms “drought resistance” refers to plants that are able to modulate one or more of the below listed characteristics as follows: maintain or increase dry biomass (of shoots and/or roots), maintain or increase stomatal conductance, maintain or increase photosynthesis when subjected to drought as compared to normal/well-watered conditions. Drought resistance also refers to the ability of a plant to exhibit an increased dry biomass (of shoots and/or roots), increased stomatal conductance, increased, photosynthesis, a reduced loss of turgor or wilting, an enhanced survivability and/or a delayed desiccation when subjected to drought as compared to a plant that is not drought resistant. Differences in physical appearance, recovery and yield can be quantified and statistically analyzed using well known measurement and analysis methods. As used herein, the term “increasing” in the expression “increasing drought resistance” of a plant refers to a modulation (increase or decrease depending on the characteristic, see above) of one or more of the above characteristics of at least 5% (higher or lower, respectively) as compared to a reference drought resistance (e.g., that of the plant in the absence of the bacterium of the present invention). In an embodiment, the modulation (increase or decrease depending on the characteristic, see above) of one or more of the above characteristics is of at least 10% (higher or lower, respectively), in a further embodiment, at least 15% (higher or lower, respectively), in a further embodiment, at least 20% (higher or lower, respectively), in a further embodiment of at least 30% (higher or lower, respectively), in a further embodiment of at least 40% (higher or lower, respectively), in a further embodiment of at least 50% (higher or lower, respectively), in a further embodiment of at least 60% (higher or lower, respectively), in a further embodiment of at least 70% (higher or lower, respectively), in a further embodiment of at least 80% (higher or lower, respectively), in a further embodiment of at least 90% (higher or lower, respectively), in a further embodiment of 100% (higher or lower, respectively).

[0111] As used herein, the terms “plant growth” refers (i) an increase in the number of leaves in the plant; (ii) an increased in the plant's height; (iii) an increase in the root and/or shoot biomass; (iv) an increase in seed yield/number; (v) an increase in the total tiller number; (vi) an increased ratio of reproductive tiller/total tiller; (vii) an increased chlorophyll content leading to darker leaves; or (viii) a combination of at least two of (i) to (vii). As used herein, the term “increasing” in the expression “increasing plant growth” refers to an increase of one or more of the above characteristics of at least 5% as compared to a reference plant growth (e.g., that of the plant in the absence of the bacterium of the present invention). In an embodiment, the increase of one or more of the above characteristics is of at least 10%, in a further embodiment, at least 15%, in a further embodiment, at least 20%, in a further embodiment of at least 30%, in a further embodiment of at least 40%, in a further embodiment of at least 50%, in a further embodiment of at least 60%, in a further embodiment of at least 70%, in a further embodiment of at least 80%, in a further embodiment of at least 90%, in a further embodiment of 100%.

[0112] As used herein, the terms “well-watered” conditions for plant refer to conditions wherein water is not a limiting factor for the plant's e.g., growth and turgidity. Such conditions vary between plant species. For example, soil moisture maintained between 0.234 cm³ cm³ and 0.227 cm³ cm³ at 0-15 cm and 0.352 cm³ cm³ and 0.350 cm³ cm³ at 30-50 cm provide well-watered conditions to the plant.

[0113] The present invention shows that the inventors' Bacillus methylotrophicus (e.g., B26) is a growth enhancer and provides drought resistance to monocotyledonous plants. Bacillus methylotrophicus is a Gram-positive, rod-shape (bacillus) that can form a hard, protective endospore allowing it to withstand harsh environment, it is an obligate aerobe and can use methanol as carbon source. Bacillus methylotrophicus is part of the Firmicutes division, from the Bacilli class in the Bacillales order and Bacillaceae family.

[0114] Forms and administrations of the Bacillus methylotrophicus of the present invention.

[0115] Although the Bacillus methylotrophicus of the present invention is effective to induce tolerance when used alone (i.e. as a biologically pure strain), it may nevertheless also be used in combination with other bacteria (e.g., one or more other PGB(s) (e.g., inducing abiotic stress resistance such as salinity and/or drought resistance; and/or inducing plant growth). The present invention encompasses the use of the Bacillus methylotrophicus of the present invention as sole PGB inducing drought resistance or in combination with one or more other PGB(s).

[0116] As used herein, the terminology “biologically pure” strain is intended to mean a strain separated from materials with which it is normally associated in nature. Note that a strain associated with compounds or materials that it is not normally found with in nature, is still defined as “biologically pure”. A monoculture of a particular strain is, of course, “biologically pure.”

[0117] For the methods and uses of the present invention, it is not necessary that the whole broth culture of the strains of the invention be used. Indeed, the present invention encompasses the use of a whole broth culture of a strain of the present invention, endospores produced by such strain, dried biomass of the strains and lyophilized strains. As used herein therefore, the terminology application of the “Bacillus methylotrophicus” of the present invention refers to application of any form or part of the strain of the present invention or a combination thereof that possesses the desired ability to induce drought tolerance.

[0118] The Bacillus methylotrophicus of the present invention (e.g., B26) can take the form of a Bacillus methylotrophicus (such as whole broth culture of a strain of the present invention, endospores produced by such strain, dried biomass of the strains and lyophilized strains), a seed of a second or subsequent (up to fourth but preferably second) generation infected with the Bacillus methylotrophicus, or a composition comprising the Bacillus methylotrophicus. The Bacillus methylotrophicus of the present invention (e.g., B26), or composition thereof may be applied to soil directly prior to seeding the plant or after planting the plant (as described e.g., at Examples 14 and 15), sprayed (e.g., whole broth culture) on the plant, soil and/or on the seed of the plant. Said seed may be applied to soil directly.

[0119] There is also provided a combination of an inoculum of a strain according to the present invention and of one or more carriers to form a composition. Formulating the Bacillus methylotrophicus in a composition may increase its potential storage time and stability. Although specific compositions are disclosed herein in Example 14, many other compositions can be used in the context of the present invention.

[0120] In order to achieve good dispersion, adhesion and conservation/stability of compositions within the present invention, it may be advantageous to formulate the Bacillus methylotrophicus (such as whole broth culture of a strain of the present invention, endospores produced by such strain, dried biomass of the strains and lyophilized strains) with components that aid dispersion, adhesion and conservation/stability or even assist in the drought resistance of the plant on which it is applied. It could be formulated as a spray, granules (e.g., as that described in example 14) or as a coating for the plant seed. These components are referred to herein individually or collectively as “carrier”. Suitable formulations for this carrier will be known to those skilled in the art (wettable powders, granules and the like, or carriers within which the inoculum can be microencapsulated in a suitable medium and the like, liquids such as aqueous flowables and aqueous suspensions, and emulsifiable concentrates).

[0121] Peat-based inoculant represents a widely form of formulation but it is not a sustainable solution as peat is a non-renewable material (Xavier, Holloway et al. 2004). Alternative methods such as the encapsulation of microorganism with biopolymer are encompassed has alternative formulation methods (Xavier, Holloway et al. 2004, John, Tyagi et al. 2011). Encapsulation is the process of making a protective capsule around the microorganism. The matrix of microsphere protects the cells by providing pre-defined and constant microenvironment thus allowing the cells to survive and maintain metabolic activity for extended period of time. Microsphere can provide a control release of microorganism as well as serve as energy source for the microorganism from its degradation. Different natural polysaccharides and protein co-extruded with calcium alginate in order to form a gelled matric, matrix material such as starches, maltodextrin, gum Arabic, pectin, chitosan, alginate and legumes protein are also encompassed by the present invention (Khan, Korber et al. 2013, Nesterenko, Alric et al. 2013). Without being so limited, useful carriers for the present invention include propylene glycol alginate, powder or granular inert materials may include plant growth media or matrices, such as rockwool and peat-based mixes, attapulgite clays, kaolinic clay, mont-morillonites, saponites, mica, perlites, vermiculite, talc, carbonates, sulfates, oxides (silicon oxides), diatomites, phytoproducts, (ground grains, pulses flour, grain bran, wood pulp, and lignin), synthetic silicates (precipitated hydrated calcium silicates and silicon dioxides, organics), polysaccharides (gums, starches, seaweed extracts, alginates, plant extracts, microbial gums), and derivatives of polysaccharides, proteins, such as gelatin, casein, and synthetic polymers, such as polyvinyl alcohols, polyvinyl pyrrolidone, polyacrylates (Date and Roughley, 1977; Dairiki and Hashimoto, 2005; Jung et al., 1982). The carrier may include components such as chitosan, vermiculite, compost, talc, milk powder, gel, etc. Other suitable formulations will be known to those skilled in the art.

[0122] Without being so limited, endospores of the present invention can be incorporated in a seed coating where the material of seed coating could be as described above, e.g., biochar, peat moss, and other biopolymer carriers e.g. activated charcoal and lignosulfonate or as described in Example 14.

[0123] As used herein, the terminology “amount effective” or “effective amount” is meant to refer to an amount sufficient to effect beneficial or desired results. An effective amount can be provided in one or more administrations. In terms inducing drought resistance in plant, an “effective amount” of the microorganism of the present invention is an amount sufficient to increase drought resistance in a plant as compared to that exhibited by plant in the absence of the microorganism. In a specific embodiment, it refers to an amount of about 1×10⁸ CFU or more/plant, plant part, or area around a plant or plant part.

[0124] Plants benefiting from the B. methylotrophicus of the present invention.

[0125] In a specific embodiment, the monocotyledonous plant is of the clade commelinids. In a more specific embodiment, the commelinid plant is of the poales order. In another more specific embodiment, the poales plant is of the poaceae family (illustrated herein with Brachypodium distachyon, Phleum pratensei (timothy grass), Triticum spp. (wheat), hordeum vulgare (barley), Avena sativa (oat), Phalaris arundinacea (reed canary grass) and Bromus inermis (smooth bromegrass)). In a specific embodiment, the poaceae plant is of the pooideae subfamily (e.g., triticum spp. (wheat), hordeum vulgare (barley), Secale cereale (rye), ×Triticosecale (triticale), Avena sativa (oat), Phleum pratensei (timothy grass) and Phalaris arundinacea (reed canary grass), Bromus inermis (smooth bromegrass) and Brachypodium distachyon)). In another specific embodiment, the poaceae plant is of the ehrhartoideae subfamily (e.g., rice). In another specific embodiment, the poaceae plant is of the panicoideae subfamily (e.g., Zea mays (corn), Sorghum bicolor (sorghum), Saccharum officinarum (sugar cane), Panicum miliaceum (Proso millet); Pennisetum glaucum (Pearl millet) Setaria italica: (Foxtail millet) Eleusine coracana (Finger millet); Digitaria spp.: (Polish millet); Echinochloa spp.: (Japanese barnyard millet); Panicum sumatrense (Little Millet); Paspalum scrobiculatum: (Kodo millet) Urochloa spp (Browntop millet)).

[0126] In another more specific embodiment, the pooideae plant is of the triticeae tribe (e.g., triticum spp. (wheat), hordeum vulgare (barley), Secale cereale (rye), ×Triticosecale (triticale)). In another more specific embodiment, the pooideae plant is of the Aveneae tribe (e.g., Avena sativa (oat), Phleum pratensei (timothy grass) and Phalaris arundinacea (reed canary grass)). In another more specific embodiment, the pooideae plant is of the bromeae tribe (e.g., Bromus inermis (smooth bromegrass)). In another more specific embodiment, the pooideae plant is of the Brachypodieae tribe (e.g., Brachypodium distachyon).

[0127] As indicated above, the methods of the present invention comprises applying the B. methylotrophicus or composition thereof (i) to the plant or to a part of the plant; and/or (ii) to an area around the plant or plant part. As used herein, the term “part of the plant” or “plant part” includes shoots, leaves, etc. but also the plant's seeds. The treated seeds can be planted thereafter and grown into a plant that exhibits drought resistance properties. As used herein the terms “area around the plant or plant part” refers to the soil or plant pot prior to planting the plant seedling or seed or after having planted the plant seedling or seed.

[0128] More specifically, Bacillus methylotrophicus strain B26 is shown herein to be able to migrate from the roots to aerial parts of seedlings and behaves as a competent endophyte for representatives of the above plants. B. methylotrophicus B26 is vertically transmitted to seeds. The internal colonization of B. methylotrophicus endophytic strain B26 is shown to modulate gene expression in plants and the genes so expressed provide clues as to the effects of B26 in plants, and trigger the plant defense mechanisms to enhance resistance against drought.

[0129] Studies based on defined model systems with reduced complexity are important in elucidating the molecular mechanisms underlying Bacillus-mediated growth promoting abilities and the physiological changes enhancing their adaptation to abiotic stress (e.g., drought stress). Brachypodium distachyon is a temperate monocotyledonous plant of the poaceae grass family that is now established as the model species for functional genomics in cereal crops and bioenergy and temperate grasses like switchgrass (International Brachypodium 2010). Bachypodium is an annual, self-fertile plant with a life cycle of less than 4 months and a small nutrient requirement throughout its growth. Brachypodium distachyon can serve as a useful functional model for studying plant-endophyte interactions as it provides rapid cycling time and ease of cultivation. Many mutant accession lines and genetic web base free tools are available. Brachypodium has proven particularly useful for comparative genomics and its utility as a functional model for traits in grasses including cell wall composition, yield, stress tolerance, cell wall biosynthesis, root growth, development, and plant-pathogen interactions had been recently reported (Brkljacic et al. 2011, Mr et al. 2011). Despite these advancements in the diverse utility of Brachypodium, the usefulness of Brachypodium to study plant-bacterial endophyte interactions had not yet been explored before the present invention.

[0130] Bacillus methylotrophicus B26 was used to colonize Brachypodium distachyon as a model system to study host-endophyte interactions. The inventors examined the effect of B. methylotrophicus B26 colonization in Brachypodium and the physiological, cellular and molecular responses. First, it was investigated whether B. methylotrophicus B26 can promote vegetative and reproductive growth of Brachypodium. Second, it was confirmed that B. methylotrophicus colonizes vegetative and reproductive tissues of Brachypodium. It was also determined which role B. methylotrophicus B26 plays in a response of Brachypodium to drought conditions and which mechanisms are involved. The inventors report that a single inoculation of Brachypodium distachyon young seedlings with the strain of Bacillus methylotrophicus B26, exerts phenotypic effects throughout the whole life cycle of the plants. Besides leading to an acceleration of flowering, seed set times, senescence in bacterized plants, and structural changes in cells of intra- and intercellularly vegetative and reproductive tissues, the endophyte strain B26 does not only modulate Brachypodium drought-responsive genes in response to acute and chronic drought treatments, but also has an effect on DNA methylation and the genes that regulate said process.

[0131] Bacillus methylotrophicus B26 was also used to colonize timothy (Phleum pratense), one of the most productive C3 grass species in terms of first cut yield, that forms low aftermath growth under dry conditions (Leme\check{z}ienė, Kanapeckas et al. 2004). It is valued for its winter hardiness, good palatability and moderate nutritional feed value, and thus making it ideal for regions prone to cold winters (Bélanger, Castonguay et al. 2006). Although it is considered a winter hardy cool-season grass, it lacks heat and drought hardiness compared to many other hay grasses mainly because of shallow, fibrous roots (H. and H. 2008). In Quebec, the production of pasture, dry hay and silage make almost 65% of the diet of dairy cattle (Canada 2003), an adequate supply of quality timothy forage is essential to meet the dietary needs (Piva et al. 2013).

[0132] The effect of inoculation of the bacterial endophyte Bacillus methylotrophicus strain B26 was demonstrated on growth, water conductance, photosynthetic activity and metabolite levels (carbohydrate and amino acids) in both shoot and root tissues of timothy grass (Phleum pratense) with strain B26 and without in response to direct water deficit stress over an extended period of time. Under non-stressed conditions, strain B26 successfully colonized the internal tissues of timothy and positively impacted plant growth compared to non-inoculated plants. Exposure of inoculated plant to 8 weeks of drought stress led to significant increase in shoot and root biomass by 26.6 and 63.8%, photosynthesis and conductance by 55.2 and 214.9%, respectively compared to non-inoculated plants grown under similar conditions. Significant effects of endophyte on metabolites manifested as higher levels of several sugars, notably sucrose and key amino acids such as asparagine, the precursors of proline, glutamic acid and glutamine. The accumulation of the non-protein amino acid GABA in shoots exposed to stress and roots of stressed and not stressed plants was improved by the presence of the endophyte. Taken together, these results indicate that B. methylotrophicus B26 aids in the survival and recovery of timothy grass from water deficit and acts in part by the modification and accumulation of osmolytes in root and shoot tissues after imposition of stress.

### Example 1: Material and Methods—Growth Promotion and Endophyte Colonization

[0133] Maintenance and preparation of Bacillus methylotrophicus 826 inoculum were achieved as follows: The Bacillus methylotrophicus strain B26, previously isolated from switchgrass and fully characterized, was maintained on Luria Broth (LB) (1.0% Tryptone, 0.5% Yeast Extract, 1.0% NaCl) (Difco, Franklin Lakes, N.J., USA) with glycerol (25% final volume) and stored at −80 C. B. methylotrophicus B26 was revived on LBA (1.5% Agar) (Difco, Franklin Lakes, N.J., USA) plates. Inoculum was prepared by placing a single colony of B. methylotrophicus B26 in 250 ml of LB and incubated for 18 h at 37° C. until an OD600 of 0.7 was reached on a shaker at 250 rpm to the mid-log phase, pelleted by centrifugation, washed and suspended in sterile distilled water (Gagne-Bourque et al. 2013).

[0134] Brachypodium line, growth conditions and B. methylotrophicus inoculation were performed as follows: Growth Chamber Experiments: Brachypodium distachyon plants from the inbred line Bd21 (Brkljacic et al. 2011) were used throughout. Bd21 seeds were surface sterilized by sequentially immerging them in solutions of 70% ethanol for 30 seconds and 1.3% solution of sodium hypochlorite for 4 minutes before rinsing them three times in sterile water (Vain et al. 2008). Cone-Tainer® (Stuewe and Sons, Tanent, Or, USA) of 164 ml capacity were used to grow the plants. Prior to use, Cone-Tainers® were surface sterilized for 12 h in 0.1% NaOCl and rinsed with distilled water. Each Cone-Tainer® was filled with 1:1:1 part of sand (Quali-Grow®, L'orignal, On, Canada)/perlite (Perlite Canada, Lachine, Qc, Canada)/Agro Mix® PV20 (Fafard, Saint-Bonaventure, Qc, Canada) previously autoclaved for 3 h at 121° C. on three constitutive days. Three Bd21 sterile seeds were planted in each Cone-Tainer® and stratified at 4° C. for 7 days after which they were placed in a climatically controlled chamber (Conviron, Winnipeg, Mb, Canada) under a 16-h photoperiod with a light intensity of 150 μmoles/m²/s and a day/night temperature regime of 25/23° C. Plants were thinned to two per Cone-Tainer® after 14 days of growth, and at the same time each Cone-Tainer® received 5 ml of B. methylotrophicus B26 inoculum (10⁶ CFU/ml) or 5 ml of water (control). Bacterized and non-bacterized (control) Con-Tainers® were placed in growth chambers with identical growth parameters as previously described. Plants were harvested after 14, 28, 42 56 days post inoculation (dpi). Seeds collected from bacterized plants 56 days post inoculation were planted following the same growth conditions except that that they were not reinoculated with B26. Second generation plants were harvested after 28 days of growth.

[0135] In-vitro Culture Experiments: plant were grown in disposable culture tube 25×150 mm (V W R, Radnor, Pa., USA) in 1× Murashige and Skoog medium with 0.3% sucrose supplemented with GAMBORG′ vitamins (Sigma-Aldrich Corp., St. Louis, Mo., USA). Stratification, seed sterilization, growth conditions and inoculation were performed in a similar manner as those grown in growth chambers. Plants were inoculated with 5 ml of B. methylotrophicus B26 after 10 days of growth. Control plants received 5 ml of sterile distilled water.

[0136] Monitoring of growth parameters of Bd21 line was performed as follows: Fourteen-day-old test and control Bd21 plant groups grown in controlled growth chambers were harvested at defined phenological growth stages (Table 2) using the BBCH numerical scale (Hong et al. 2011). Harvesting was done at growth stage BBCH 13 prior to inoculation with B. methylotrophicus B26 (i.e., 0 dpi) and at the following days post inoculation (dpis) with their corresponding growth stage: 14 dpi (BBCH45), 28 dpi (BBCH55), 42 dpi (BBCH77), 56 pdi (BBCH97).

TABLE 2
Scale for phenological growth stages in Brachypodium distachyon

| Dpi* | Stage** | Description |
|---|---|---|
| 0 | BBCH13 | 3rd true leaf unfolded |
| 14 | BBCH45 | Late boot stage: flag leaf sheath swollen |
| 28 | BBCH55 | Middle of heading: half of inflorescence emerged |
| 42 | BBCH77 | Late milk |
| 56 | BBCH97 | Plant dead and collapsing |
| 70 | BBCH99 | Harvested seed |

*Days post inoculation.
**Biologische Bundesanstalt Bundessortenamt and Chemische Industrie (BBCH) growth scale (s-Yhong et al.2010).

[0137] At each harvesting time point, a minimum of fourteen Bd21 plants from seven bacterized and non-bacterized Cone-Tainers™ were monitored for root and shoot lengths, shoot and root dry weights, and number of leaves and tillers. Spikelet formation was recorded on a weekly basis while the number of seeds heads and viable seeds were recorded at the end of each experiment. Above ground nutrient content of N, P, K and Mg in vegetative above ground tissues was analyzed by Kjeldahl procedure using sulphuric acid and hydrogen peroxide digestion (Parkinson, 1975). Values were estimated in mg per gram of dry weight of tissue. All experiments were replicated two times using different growth chambers in order to control the effects of microenvironment variation.

[0138] The distribution and colonization of Brachypodium by B. methylotrophicus B26 using culture-dependent and culture-independent methods was performed as follows: To ensure that B. methylotrophicus B26 successfully and systemically colonized different plant tissues of the accession Bd21 and its intracellular spread is sustained at various Brachypodium growth stages (i.e., early and late vegetative, and reproductive stage), bacteria cell numbers and DNA copy number were determined in tissue samples and rhizosphere soil of bacterized and control Brachypodium plants. Root and leave tissues of test and control plants (first generation) of different growth stages were sampled at 14, 28 and 42 dpi, and entire young Brachypodium plants from second generation were sampled at 28 days of growth. All plants were surface sterilized as previously described (Gagne-Bourque, 2013 #397). 200 mg of tissue were pulverized to powder using a sterile mortar and pestle, serially diluted in sterile distilled water and plated on LBA. Bacterial enumeration of rhizospheric soil (1 gram) from bacterized and control Brachypodium plants was serially diluted in sterile distilled water, shaken for 30 min and plated on LBA (Skinner et al. 1952). Plates were incubated at 37° C. for 48 h. Colony forming units (CFUs) were determined and calculated to CFU per gram of fresh weight of tissue or soil. There were three biological replicates for each treatment and each replicate contained root, aerial systems or rhizospheric soil of 3 plants.

[0139] The presence of B. methylotrophicus B26 cells inside bacterized plants was also confirmed by quantitative real-time PCR (QPCR) assays. Surface sterilized plant tissues were reduced to powder in liquid nitrogen, and genomic DNA was extracted from 200 mg of powdered tissue using the CTAB method (Porebski et al. 1997) and resuspended in 100 μL of autoclaved distilled water. Genomic DNA from B. methylotrophicus B26 colonies was extracted by direct colony PCR (Woodman 2005). Briefly, single colonies were mixed with sterile distilled water, incubated at 95° C. followed by centrifugation and the supernatant was used as template DNA in conventional PCR assays.

[0140] Endophytic colonization by B26 was also confirmed by transmission electron microscopy. Fresh plant organs (roots, stems, leaves), removed from bacterized and their corresponding plants grown in vitro and in potting mix in growth chambers, were collected 5 days and 14 dpi days after inoculation, respectively. In parallel, seeds collected from the first generation plants were also collected. Sample were processed following the protocol by Wilson and Bacic, 2012 but with some modifications: fixation was carried out with 2.5% glutaraldehyde in 0.1M sodium cacodylate buffer for 7 days at 4° C., sample were washed 3 times with 0.1M sodium cacodylate washing buffer and finally an extra staining with Tannic acid 1% staining was performed after the Osmium tetroxide staining. After polymerization, capsules were trimmed and cut in section of 90-100 nm thick with an UltraCut™ E ultramicrotome (Reichert-Jung, Depew, N.Y., USA) and placed onto a 200 mesh copper grid. Samples were further stained with Uranyl acetate for 8 min, followed by Reynold's lead for 5 min. Samples were observed using a FEI Tecnai 12 120 kV transmission electron microscope (TEM) equipped with an AMT XR80C 8 megapixel CCD camera (Hillsboro, Or, USA). All reagents were purchased from Electron Microscopy Sciences, Hatfield, Pa., USA except for the Osmium tetroxide and Epon that that were supplied from Mecalab, Montreal, Qc, Canada.

[0141] B. methylotrophicus B26 DNA copy numbers in bacterized plant tissues and seeds were assessed by PCR amplification and quantification. The presence of B. methylotrophicus strain B26 within vegetative and reproductive tissues of first and second generation Brachypodium plants was confirmed by PCR using strain-specific primers (Table 3). PCR reactions along with no template controls were run under previously described conditions (Gagne-Bourque et al. 2013) using T100™ Biorad thermal cycler (BioRad, Hercules, Calif., USA. PCR products were separated on 1% agarose gels and visualized using Gel Logic 200 Imaging system from (Kodak, Rochester, N.Y., USA) under UV light.

[0142] Quantification of B. methylotrophicus B26 DNA copy number as a measure of colonization of vegetative and reproductive organs of Brachypodium was monitored at different growth stages and also in second generation plants grown from bacterized seeds using qPCR. B. methylotrophicus amplicons were purified with a QlAquick™ PCR-purification kit and cloned into pDrive (Qiagen, Venlo, Netherlands). Plasmid DNA was purified and sent for sequencing at Genome Quebec. Sequencing results were compared to the Genbank accession Ref#JN689339. The copy number of plasmid was calculated based on the concentration of purified plasmid DNA and the molecular mass of the plasmid (vector plus amplicon). A standard curve for B. methylotrophicus B26 was constructed based on the following copy numbers: 10⁹, 10⁸, 10⁷, 10⁶, 10⁵, 10⁴, 10³ and 10² which are the range of B. methylotrophicus B26 copy numbers in the different tissues of the plant. The amplification mixture reaction contained: 400 ng of template DNA, 12.5 μL of 2×SYBRII™ master mix (Agilent Technologies, Morrisville, N.C., USA), 2.5 μmol L⁻¹ of each primer and 2 μmol L⁻¹ of ROX (Agilent Technologies, Morrisville, N.C., USA) in a total volume of 25 ul. To overcome the effects of inhibitors present in the root DNA, 2.5 mg of BSA (Sigma, Oakville, On, Canada) and 3% of DMSO (Fisher, Ottawa, On, Canada) were added to each reaction. Amplification was performed in a Stratagene™ Mx3000P real-time thermal cycler (Agilent Technologies, Morrisville, N.C., USA) under the following conditions: one cycle of initial denaturation at 95° C. for 10 min, followed by 40 cycles of denaturation at 95° C. for 30 s, annealing at 50° C. for 45 s and extension at 72° C. for 45 s.

TABLE 3
List of specific and universal primers used in quantitative PCR assays

| | | | | Amplicon | GenBank for target | |
|---|---|---|---|---|---|---|
| Function | Target gene | Forward and reverse primer sequences | Primer Tm | size (bp) | gene | Query/Reference |
| Drought responsive | DHN3-like | CTCCAGCTCGTCCGAGGAT (SEQ ID | 58.8 | 112 | XM_003574949.1 | ABO14458.1 |
| | | NO: 27) | | | | |
| | | AGCCATGTGCTGCTGGTTAT (SEQ ID | 57.2 | | | |
| | | NO: 28) | | | | |
| | LEA-14-A-like | TCGACTACGAGATGCGGGTC (SEQ ID | 58.7 | 115 | XM_003565767.1 | NP_171654 |
| | | NO: 29) | | | | |
| | | CAGAAGATGTCGGAGAGCGTG (SEQ | 57.6 | | | |
| | | ID NO: 30) | | | | |
| | DREB2B-like | AGCTGACGACCTCTTTGAGC (SEQ ID | 57.2 | 110 | XM_003568607.1 | BAA36706 |
| | | NO: 31) | | | | |
| | | CTACCGGGTCAGCTTCCATC (SEQ ID | 57.4 | | XM_003568608.1 | |
| | | NO: 32) | | | | |
| Methyltransferases | MET1B-like | AGACCTCCCACCTCTCTTGG (SEQ ID | 58.2 | 101 | XM_003561293.1 | NP_199727.1 |
| | | NO: 33) | | | | |
| | | GCTCAGTCTCCAATTGGCCT (SEQ ID | 57.5 | | | |
| | | NO: 34) | | | | |
| | CMT3-like | GATCGCGTGCAACAGATTCC (SEQ ID | 56.8 | 110 | XM_003571630.1 | NP_177135.1 |
| | | NO: 35) | | | | |
| | | ACTCGCTGAACTTCTGGGTC (SEQ ID | 56.9 | | | |
| | | NO: 36) | | | | |
| | DRM2-like | AAGAAGACAGCTCAACTGCGTGC | 60 | 77 | XM_003575408.1 | NP_196966.2 |
| | | (SEQ ID NO: 37) | | | | |
| | | TTGCAAGAGCACATTGGATCCGC (SEQ | 60.5 | | | |
| | | ID NO: 38) | | | | |
| Internal Standard | Bradi18S | GAAGTTTGAGGCAATAACAGGTCT | 55.3 | 131 | XM_003579769.1 | Colton-Gagnon et |
| | | (SEQ ID NO: 39) | | | | al., 2013 |
| | | ATCACGATGAATTTCCCAAGATTAC | 53.5 | | | |
| | | (SEQ ID NO: 40) | | | | |
| | SamDC | AGCGAGTCGACGATACCCTT (SEQ ID | 57.9 | 190 | DV482676 | Hong et al., 2008 |
| | | NO: 41) | | | | |
| | | TGCTAATCTGCTCCAATGGC (SEQ ID | 55.4 | | | |
| | | NO: 42) | | | | |
| Quantification of B. | 16s ITS rRNA | CAAGTGCCGTTCAAATAG (SEQ ID NO: | 48.7 | 565 | JN_689339 (SEQ ID | Gagne-Bourque et al., |
| methylotrophicus | | 43) | | | NO: 45) | 2013 |
| | | CTCTAGGATTGTCAGAGG (SEQ ID NO: | 48.3 | | | |
| | | 44) | | | | |

[0143] Standard curves and no template controls were run with each plate. All samples were performed in triplicate technical runs. Amplification results were expressed as the threshold cycle (Cₜ) value and converted to copy numbers by plotting the Cₜ values against the standard curve. The coefficient of variation was calculated for each sample to ensure repeatability of amplification. Samples with a coefficient of variation above 1 had their outliers removed.

[0144] RNA extraction and cDNA synthesis were performed on aerial parts of four bacterized and not bacterized plants which were pooled and reduced to fine powder in liquid nitrogen. Total RNA was extracted from 100 mg of powder using the Total RNA Mini Kit, plant (Geneaid, Shanghai, China) following the manufacturers protocol. All RNAs were treated with DNase I (Qiagen, Venlo, Netherlands) to remove genomic DNA (Qiagen, Venlo, Netherlands). cDNA was synthesized using the iScript™ cDNA Synthesis Kit (BioRad, Hercules, Calif., USA). The resulting cDNA samples were diluted to a final concentration of 2.5 ng/μL for QPCR, and stored at −20° C. Parallel reactions were run for each RNA sample in the absence of reverse transcriptase (no RT control) to assess any genomic DNA contamination.

### Example 2: The Inoculation of Bacillus methylotrophicus Strain B26 Improved Production of Biomass and Seeds

[0145] The model plant Brachypodium distachyon provides many advantages for genomics in grasses including its small genome and rapid life cycle, public databases for genome sequences and gene information. In the present application, the inventors sought to examine the ability of B. methylotrophicus B26 to promote growth of Brachypodium in growth chamber experiments. Bacterized Brachypodium plants developed faster relative to non-bacterized plants and showed a significant and steady increase in plant growth at 28 dpi (P<0.05). At the reproductive stage (56 dpi), significant growth promotion with a 65.8%, 63.8%, 42.3% and 41.5% increases in plant height (FIG. 2 A), shoot (FIG. 2 B) and root (FIG. 2 C) dry biomass and number of leaves (FIG. 2 D), respectively was observed, suggesting that B26 behaved as a plant growth promoting bacterium in Brachypodium (FIG. 2F). Bacterized plants produced 64% more seed heads than control plants (FIG. 3), indicating that more tillers became reproductive in bacterized plants. Notably, bacterized plants produced 121% more spikelets (FIG. 3) resulting in approximately 377% increase in seed yield (FIG. 2 E). Concentrations of N, P, K and Mg in above ground tissues of bacterized plants were significantly lower at 42 dpi (Table 4), indicating that the growth promoting ability was not related to increase in nutrients.

TABLE 4
Nutrient analysis of above ground of control (C) and bacterized
Brachypodium with B. methylotrophicus 26 (B+)

| | Above Ground Tissues* | | | | |
|---|---|---|---|---|---|
| | Nutrients (mg/g) | | | | |
| | Days post | Nitro- | | | |
| Treat- | inoculation | gen | Phosphorus | Potassium | Magnesium |
| ment | (dpi) | (N) | (P) | (K) | (Mg) |
| B+ | 28 | 32.83a | 7.98a | 29.47a | 1.59a |
| Control | 28 | 38.38a | 7.60a | 3.07a | 1.75a |
| B+ | 42 | 15.75b | 4.39b | 16.39b | 0.85b |
| Control | 42 | 21.52a | 6.55a | 21.92a | 1.11a |

[0146] Tissues were harvested 28 and 42 days post inoculation (dpi) with B. methylotrophicus. Analysis data were subjected to one-way ANOVA. The significance of the effect of the treatments was determined via Tukey HSD with a magnitude of the F-value (P=0.05). Treatments were tested in pairwise comparison for each time point dpi

### Example 3: B. methylotrophicus Strain B26 Successfully and Stably Colonize Vegetative and Reproductive Organs of Brachypodium distachyon

[0147] Colonization demonstrated by bacterial counts and CFU. The success of internal and systemic colonization of Brachypodium distachyon by B. methylotrophicus B26 was confirmed by culture-dependent and independent methods. Re-isolation and quantification of B. methylotrophicus strain B26 by the plating method in different surface-sterilized tissues of first and second generations of Brachypodium plants after soil drench treatment with B. methylotrophicus clearly demonstrate that B. methylotrophicus B26 can form sustaining endophytic populations in roots, shoots and seeds as well as in the soil around the roots of Brachypodium (Table 5 below). Following rhizosphere colonization of Brachypodium, bacterial counts within root tissue changed with the plants growth stage, while numbers of CFUs in shoots stabilized over the last two growth stages (BBCH 55 and BBCH97). However, population numbers in shoots were consistently higher than in roots indicating that there was successful translocation from roots to shoots. CFU numbers in rhizosphere soil remained stable over time. Moreover, vegetative tissues of the Brachypodium young plants (BBCH45) that originated from seeds of the first generation sustained similar population numbers to those from the first generation for the corresponding growth stage (Table 5 below). Population numbers in Brachypodium seeds were lower by a factor of 10 compared to other tissues. Rhizosphere soil and surface sterilized tissues of control plants did not yield cultivable bacterial colonies.

[0148] Surface-sterilized tissues of 1^{st} and 2^{nd} generations of Brachypodium clearly demonstrate that B. methylotrophicus B26 can form sustaining endophytic populations in all tissues as well as in the rhizosphere. Bacterial counts (CFU) in shoots were consistently higher than in roots. Brachypodium vegetative tissues originating from seeds of the 1^{st} generation sustained similar population numbers to those from the 1^{st} generation for the corresponding growth stage.

[0149] Colonization demonstrated by QPCR. Additionally, the presence of B. methylotrophicus B26 in different tissues of Brachypodium was confirmed by QPCR in bacterized plants (FIG. 4). An amplicon with the expected product size of 565 bp was successfully amplified using species-specific primers for B. methylotrophicus B26 from DNA extracted from each tissue type (FIG. 4). Non-bacterized tissue samples tested negative for the presence of B. methylotrophicus B26. (FIG. 4). Absolute quantification by QPCR of B. methylotrophicus B26 copy numbers sustained the same numbers in the root at all growth stages and a small decrease in shoot tissue, with 10 times more copy in Brachypodium shoots compared to roots (FIG. 4). Copy numbers in seeds of B. methylotrophicus B26 were the lowest of all tissues tested. Second generation plant tissue showed the highest concentration of endophyte in the root and a lower amount in the shoot than in the bacterized plant at corresponding growth stages.

[0150] Absolute quantification of B. methylotrophicus B26 copy numbers by qPCR sustained similar numbers in roots at all growth stages; a small decrease in shoots; and lower numbers in seeds. Second generation plant tissues had the highest concentration of endophyte in roots and a lower amount in shoots compared to 1^{st} generation.

TABLE 5
Dynamics of B. methylotrophicus B26 in the host plant. Colony Forming Units (CFU) and
DNA copy number of B. methylotrophicus B26 in roots, shoots, seeds and rhizospheric soil.
Uppercase letter represent difference in between time point of the same tissue/soil and
lowercase represent difference between different tissues at the same time point.

| | | Log CFU/g Fresh Weight | | | | Copy/100 mg Tissue | | |
|---|---|---|---|---|---|---|---|---|
| | | Tissue | | | | Tissue | | |
| Growth stage | | Root | Shoot | Seed | Soil | Root | Shoot | Seed |
| | Day post inoculation | | | | | | | |
| | (dpi) | | | | | | | |
| BBCH45 | 14 | 3.68 Ca | 3.62 Ba | | 3.68 A | 2.06 × 10⁵ Ac | 3.24 × 10⁶ Aa | |
| BBCH55 | 28 | 3.86 Ab | 3.91 Aa | | 3.67 A | 2.07 × 10⁵ Ab | 3.55 × 10⁶ Aa | |
| BBCH97 | 56 | 3.76 Bb | 3.92 Aa | | 3.63 A | 1.82 × 10⁵ Ab | 1.63 × 10⁶ Ba | |
| BBCH99 | 70 | | | 2.47 | | | | 1.45 × 10⁵ |
| | Second generation plant | | | | | | | |
| | Age in days (D) | | | | | | | |
| BBCH45 | 28 | 3.60 Aa | 2.76 Bb | | | 1.97 × 10⁶ Aab | 3.52 × 10⁵ Bbc | |

### Example 4: Effect of Systemic Colonization of Plants by B. methylotrophicus B26 on Immune Response

[0151] The ability of bacterial endophytes to colonize plants is a complex process requiring resistance to plant defence systems. To assess therefore whether the systemic colonization of Brachypodium distachyon by B. methylotrophicus B26 triggers an immune response, the inventors monitored the transcript accumulation levels of the pathogenesis-related PR1 gene in bacterized and non-bacterized plants using qRT-PCR. Since the PR1 gene is not fully characterized in the Brachypodium model, the inventors first sought to determine if an exogenous application of salicylic acid (SA) could trigger a transcripts accumulation of the selected Brachypodium PR1-like gene (FIG. 5 B). As expected, Brachypodium plants sprayed with 5 mM solution of SA had 84 times more PR1-like transcripts than control plants at 24 hours after treatment. The inventors then monitored the PR1-like transcript accumulation patterns during the early colonization stages of Brachypodium plants by B. methylotrophicus B26. Bacterized plant showed a 6-fold increase of PR1-Like transcript accumulation at dpi 3 and 4 followed by a decrease to basal levels at dpi 5 and 7 (FIG. 5A). Taken together this result suggests that Bacillus methylotrophicus B26 is mostly perceived as a non-pathogenic bacterium during the systemic colonization of Brachypodium distachyon.

### Example 5: Material and Methods—Water Deficit Stress

[0152] Growth conditions and drought stress were assessed as follows: To investigate whether B. methylotrophicus B26 confer drought tolerance to Bd21, two types of drought stress were applied: chronic and acute water deficit stresses. Studies on the effect of chronic water deficit stress were carried out on Brachypodium seedlings stratified and germinated as previously described but planted in 10×10 cm pots (ITML, Brantford, On, Canada) filled with sterilized Agro Mix® G6 (Fafard et frères, Qc, Canada) with three plants per pot. Plants were grown under the same growth chamber conditions and were inoculated or not with B. methylotrophicus B26 as previously described.

[0153] Chronic water deficit stress was conducted on test and control plants at dpi 28 by withholding water from the bacterized plants while control plants were watered with 50 ml of sterile water 3 times per week. Plants were harvested on day 0, 5 and 8 of withholding water and leaf tissue was immediately frozen in liquid nitrogen and prepared for transcript accumulation analysis for drought responsive genes and starch and sugar content analysis. A total of 3 replicates per treatment were sampled at each time point. A replicate consisted of 3 plants. The experiment was repeated twice.

[0154] Acute water deficit stress was applied on young Bd21 seedlings grown in vitro cultures at 3 pdi, by uprooting the plants from the medium and left on an open bench for 1 hour before being flash frozen in liquid nitrogen. The entire plants were sampled, flash frozen in liquid nitrogen and subjected to transcript accumulation analysis. A total of 4 replicates per treatment were sampled and the experiments were repeated three times. FIG. 6 shows the methodology used herein to subject Brachypodium distachyon to chronic water stress.

[0155] Gene identification and primer design were performed as follows: Using Arabidopsis thaliana protein sequences as query, identified Brachypodium distachyon's orthologs of the following drought-responsive encoding genes; DREB2B, LEA-14, DHN3 and the DNA methyltransferase encoding genes MET1B, CMT3, and DRM2 were used. The drought responsive gene, DHN3-like was identified using a DHN3 protein sequence from Hordeum vulgare (Table 3). Primer sets were designed using Primer BLAST for specificity and synthesized by Integrated DNA Technologies, Inc. (Coralville, Iowa, USA). The primer pairs for 18S Ribosomal RNA and SamDC have been used previously (Colton-Gagnon et al. 2013; Hong et al. 2008).

[0156] RT-QPCR data analysis and relative quantification of stress-responsive genes and PR1 were performed as follows: Quantitative real-time PCR was performed using a CFX Connect Real Time system (BioRad, Hercules, Calif., USA), using Sso-advanced SYBR green Supermix (BioRad, Hercules, Calif., USA). Amplification was performed in an 11 μl reaction containing 1×SYBR Green master mix, 200 nM of each primer, 10 ng of cDNA template. The PCR thermal-cycling parameters were 95° C. for 30 seconds followed by 40 cycles of 95° C. for 5 seconds and 57.5° C. for 20 sec (Table 3). Three technical replicates were used and the experiment was repeated three times with different biological replicates. Controls without template were included for all primer pairs. For each primer pair, two reference genes (18S and SamDC) were used for normalisation. The RT-qPCR data was analysed following the Livak method (Livak and Schmittgen 2001).

[0157] Starch and water-soluble sugar analyses were performed as follows: one hundred (100) mg of freeze-dried ground leaf tissues of bacterized or not plants subjected to drought or not were pooled and reduced to fine powder in liquid nitrogen. Soluble sugars were extracted with methanol/chloroform/water solutions and analyzed as described in Piva et al 2013 using a Waters ACQUITY Ultra Performance Liquid Chromatography (UPLC) analytical system controlled by the Empower II software (Waters, Milford, Mass., USA). Peak identity and quantity of raffinose, sucrose, glucose and fructose were determined by comparison to standards. Total starch was extracted from the non-soluble residue left after the methanol/chloroform/water extraction and quantified as a glucose equivalent following enzymatic digestion with amyloglucosidase (Sigma A7255; Sigma-Aldrich Co., St. Louis, Mo.) and colorimetric detection with p-hydrobenzoic acid hydrazide method of (Blakeney, 1980 #460).

[0158] DNA methylation analyses were performed as follows: A global DNA methylation assay was performed using the Imprint® Methylated DNA Quantification Kit (Sigma-Aldrich Corp., St. Louis, Mo., USA) according to the manufacturer's recommendations with 200 ng/μL of DNA per well. Each sample was measured in technical quadruplicate using a 680 Microplate reader (BioRad, Hercules, Calif., USA). Genomic DNA was extracted following the methods mention previously.

[0159] Statistical analysis was performed as follows: All experimental data were subjected to statistical analyses by performing one-way ANOVA using the JMP 10.0 software (SAS Institute, Cary, N.C., USA). The significance of the effect of the treatments was determined via Tukey HSD with a magnitude of the F-value (P=0.05). In the case of repeated experiment trials results were tested using Levene's test for equality of variance (P=0.05) and pooled if permitted.

### Example 6: B. methylotrophicus Bacterized Plant Tolerance to Water-Deficit Stress

[0160] Bacterized Brachypodium plants were more tolerant to water-deficit stress as demonstrated as follows: An unexpected observation that bacterized Brachypodium plants uncared-for for several days were doing notably better than the non-bacterized ones prompted the inventors to evaluate the contribution of B. methylotrophicus B26 to the plant's capacity to tolerate drought. An initial assay, consisted of an acute water-deficit stress applied by uprooting young non-bacterized and bacterized Brachypodium seedlings grown in vitro from the medium and by leaving them on an open bench for 1 h. After this acute drought treatment, the leaf tips of non-bacterized plants showed clear signs of wilting while bacterized plants looked mostly unaffected (FIGS. 9 A to C). A chronic drought treatment was performed in a soilless potting media with non-bacterized and bacterized plants at 28 dpi by withholding water for 5 and 8 days. Again, bacterized plants showed less signs of wilting and ultimately died later than non-bacterized plants (FIGS. 9 D to F).

### Example 7: Gene Expression During Drought Conditions in the Presence of B. methylotrophicus B26

[0161] Plant genes may be modulated by the presence of B. methylotrophicus B26, and the genes so expressed provide clues as to the effects of endophytes in plants.

[0162] B. methylotrophicus strain B26 modulated the expression of the plant's drought responsive genes. To determine the role of B. methylotrophicus B26 in the plant's drought-response mechanism, Brachypodium genes with high sequence similarities to genes previously characterized to play active roles in the drought-stress response of plants (Table 3) were selected and quantitative real-time PCR assays were conducted to monitor their transcript accumulation profiles. Bacterized and non-bacterized Brachypodium plants grown in vitro under control conditions displayed similar accumulation profiles of the DREB2B-like transcript (FIG. 7A). However, a one-hour acute drought treatment triggered increases in DREB2B-like transcripts accumulation of respectively 2.5 fold and 3 fold in non-bacterized and bacterized Brachypodium plants (FIG. 7A). On the other hand, bacterized plants grown under normal conditions in soilless potting media had 14-times more DREB2B-like transcript levels than non-bacterized plants grown in similar conditions (FIG. 7B). In addition, chronic drought conditions, obtained by withholding water for 5 and 8 days, caused significant increases in the levels of DREB2B-like transcripts in bacterized plants but not in non-bacterized plants (FIG. 7B).

[0163] The transcription factor DREB2B has been shown to act upstream of structural proteins such as dehydrins in Arabidopsis and other plants. Changes in the expression profiles were monitored in response to acute and chronic drought stresses of two Brachypodium genes with high sequence similarities to the dehydrins DHN3 and LEA-14-A. Compared to non-bacterized Brachypodium plants, a 70-fold accumulation in DHN3-like transcripts was observed in bacterized control plants grown in vitro (FIG. 7C) while no significant difference was observed for plants grown in soilless potting mix growth media (FIG. 7D). The application of an acute drought treatment triggered a 20-fold accumulation of the DHN3-like transcript in non-bacterized (non-inoculated) plants as compared to that in its corresponding control plant but had no significant effect (as compared to that in its corresponding control plant) on the already high accumulation of this transcript in bacterized (inoculated) plants (FIG. 7C). Conversely, chronic drought treatments of either five or eight days triggered a 85-fold accumulation of the DHN3-like transcript in bacterized plants and a 9-fold accumulation of the same messenger in non-bacterized plants (FIG. 7D). A similar transcript accumulation pattern was also observed for the LEA-14-A-like gene (FIGS. 7E and F).

### Example 8: Structural Changes in Colonized Plant Tissues

[0164] Structural changes in colonized plant tissues were assessed as follows: The interaction of B. methylotrophicus B26 with Brachypodium was followed using transmission electron microscopy (TEM). The inventors examined the internalization and distribution of B. methylotrophicus B26 within roots, leaves, stems and seeds of bacterized (14 and 28 dpi) Brachypodium plants grown under gnobiotic and greenhouse conditions, (FIG. 8). TEM analysis of tissue sections confirmed the presence of B. methylotrophicus B26 cells inside xylem tissue of roots (FIG. 8A), mesophyll cells and bundle sheath of leaves (FIGS. 8 B and C) stems (D), in seeds (FIG. 8E) and in choloroplast of a leaf bundle sheath cell (FIG. 8F). The morphology and size of B. methylotrophicus B26 cells inside plant tissues are identical to B. methylotrophicus B26 cells grown in pure culture (FIG. 8G). Mesophyll cells close to leaf veins of bacterized plants show substantial accumulation of unusually large starch granules in the chloroplast interspersed in the stroma and sometimes separating the thylakoids (FIG. 8F). However, the outer membranes of the plastids were still intact (FIG. 8F, arrow). Mesophyll cells of non-bacterized leaf blades had little or no starch granules (data not shown). Sections of control samples were devoid of bacterial cells (data not shown), suggesting no indigenous colonization.

### Example 9: Carbohydrate and Starch Accumulation in B. methylotrophicus Bacterized Plant in Drought Stress Conditions

[0165] Osmoregulation in plants via accumulation of soluble sugars like glucose, sucrose and fructose is a known mechanism for maintaining homeostasis in plants under drought stress conditions (Wang et al. 2010) and their metabolism play a significant role in drought and cold stress tolerance (Valliyodan et al 2006). Similarly, increased biosynthesis rates of soluble sugars in corn inoculated with a plant growth promoting pseudomonas exposed to drought stress was also reported (Figueiredo et al 2008).

[0166] Bacillus methylotrophicus B26 stimulated carbohydrate and starch accumulation under drought stress conditions. Leaf tissues of B. methylotrophicus inoculated and non-inoculated Brachypodium were analyzed for carbohydrate and starch at the end of 5 and 8 days of chronic drought stress. Stressed inoculated plants had almost 2-fold and 3-fold increase of total starch at the end of 5 and 8 days of drought stress respectively, compared to stressed but not-inoculated plants (FIG. 10). Drought stress did not have any influence on the amount of individual and total sugars of inoculated and non-inoculated plants after 5 days of stress. Inoculated plants exposed to stress for 8 days however had 1.4-fold more of total soluble sugars, and also 2.9-fold and 1.4 fold increases in glucose and fructose, respectively.

[0167] This increase in total soluble sugar and starch in above ground tissues of Brachypodium-inoculated plants could compensate the drought effects and improve plant developments through among others, the enhanced production of soluble sugars resulting in a better absorption of water and nutrients form the soil.

[0168] The latter observation ties well with copious accumulation of large starch granules in the stroma of chloroplasts of leaf bundle sheath cells of bacterized plants relative to control plants. The starch packing had no visible effects on the grana. To the best of the inventors' knowledge, this extensive loading of leaf chloroplasts with starch in response to bacterial endophytic colonization has not been reported. In addition to increased availability of starch as reserve to plants under stress, this modification could result in the enhancement of nutrient flow to bacterial cells.

### Example 10: DNA Methylation in B. methylotrophicus Bacterized Plant in Drought Stress Conditions

[0169] Drought conditions have been shown to naturally induce DNA methylation changes in plants that in turn increase the plant resistance toward the stress by allowing the expression of protective genes involved in the drought response.

[0170] Bacillus methylotrophicus B26 triggered changes in DNA methylation in Brachypodium. The changes in transcript accumulation observed in FIG. 11 suggest that B. methylotrophicus B26 triggered important chromatin changes in the host plant. Whole plant DNA methylation was measured in bacterized and non-bacterized Brachypodium plants under normal and drought conditions (FIG. 11). B. methylotrophicus B26 triggered 6-fold and 1.5-fold increases in global DNA methylation in plants grown under normal conditions either in vitro (FIG. 11A) or in soilless potting mix (FIG. 11B). On one hand, after one hour of acute drought treatment, the global DNA methylation levels observed in in vitro bacterized plants returned to those of non-bacterized plants while this treatment had no effect on the global DNA methylation levels of non-bacterized plants (FIG. 11A). On the other hand, clear reductions in global DNA methylation were observed in non-bacterized plants after five and eight days of chronic drought treatment (FIG. 11B). These reductions were not observed in bacterized plants exposed to similar drought stress conditions since an overall increase in whole plant DNA methylation pattern was observed after five days of chronic drought. These results suggest that B. methylotrophicus can affect the epigenetic regulation of Brachypodium distachyon before and during drought stress.

### Example 11: DNA Methyltransferases Expression in B. methylotrophicus Bacterized Plant in Drought Stress Conditions

[0171] The drastic changes in global DNA methylation observed upon bacterization of Brachypodium suggest the involvement of several DNA methyltransferases in regulating that process. Changes of transcript accumulation were monitored in bacterized and non-bacterized plants in response to drought for three DNA methyltransferases: MET1B-like, CMT3-like and DRM2-like. As shown in FIG. 12, drought treatments had very little impact on the transcript accumulation of the three DNA methyltransferases tested in non-bacterized plants either grown in vitro (FIGS. 12A, C, E) or in soilless potting mix (FIGS. 12 B, D, F). Similarly, bacterized Brachypodium plants grown in vitro under control conditions did not show significant differences in accumulation of DNA methyltranferase transcripts (FIGS. 12A, C and E). On the opposite, bacterized Brachypodium plants subjected to one hour of acute drought stress showed increased MET1B-like and DRM2-like transcript accumulations (FIGS. 12A and E). In addition, bacterized plants grown in soilless potting mix under control conditions accumulated more of the three DNA methyltransferase transcripts than non-bacterized plants (FIGS. 12B, D and F). Moreover, chronic drought conditions for five and eight days further increased the accumulation of these transcripts in bacterized plants but not in non-bacterized plants (FIGS. 12B, D and F).

### Example 12: Material and Methods—Bacillus methylotrophicus B26 for Promoting Growth in Crop Plants

[0172] Poaceae plant growth conditions: Seeds from corn, wheat, barley, oat, timothy, smooth bromegrass and reed canarygrass were grown in a growth chamber at 22° C. under a 12 h/12 h of light/dark cycle, water with 300 ml of water 3 times per week and fertilize every 14 days with 300 ml per pots of a solution of 2 g/liter of all-purpose fertilizer 20-20-20 (Plantprod, Laval, Québec). Plants were grown in 15*20 cm pots filled with Agromix® (Plantprod, Laval, Quebec). 5 plants were grown per pot, except for corn were 2 plants was used. 10 plants for each species per treatment was use.

[0173] Maintenance and preparation of Bacillus methylotrophicus 826 inoculum: Bacterial endophytes Bacillus methylotrophicus B26 were grown in LB broth for 18 h to the mid-log phase, pelleted by centrifugation, washed and suspended in sterile distilled water. 14 days after planting, each plant received 5 ml of water containing 10⁵ CFU ml⁻¹ of bacteria. Seedlings receiving autoclaved distilled water served as controls.

[0174] After 91 days of growth all the plants were harvested, dried for 4 days at 55° C. and dry weight of all plants was recorded and statistically compared to control treatment.

[0175] Statistical analysis was performed as follows: Data were analyzed by one-way ANOVA using the JMP 10.0 software (SAS Institute, Cary, N.C., USA). The significance of the effect of the treatments was determined by the magnitude of the F-value (P=0.05) and difference in treatment was determined using the Tukey HSD test (P=0.05).

### Example 13: Effect of Bacillus methylotrophicus B26 on Growth in Crop Plants

[0176] The experiment was designed to test the ability of bacterial endophytes, Bacillus methylotrophicus B26, to colonize and affect growth in different crop types of the Poaceae family. The difference in growth between inoculated and non-inoculated plants of wheat (FIG. 13A), barley (FIG. 13B), and oats (FIG. 13C) was assessed visually at harvest, and by the respective dry mass of said plants (FIG. 13D). The differences in all three species between inoculated and non-inoculated plants were statistically significant.

[0177] Similar differences were determined in the comparison of inoculated and non-inoculated grasses, such as reed canarygrass (FIG. 14A), smooth bromegrass (FIG. 14B), and timothy grass (FIG. 14C). Again the differences were assessed visually at harvest and via determination of their respective dry mass (FIG. 14D).

### Example 14: Formulation of Bacillus methylotrophicus B26 in Microspheres for Promoting Growth in Crop Plants

[0178] Production of microencapsulated Bacillus methylotrophicus B26. Pea protein isolate-alginate microspheres were prepared via extrusion technology according to (Khan, Korber et al. (2013)). The bacterial suspension was added to the polymer at a bacteria-to-polymer ratio of 1:10 (v/v). The bacteria loaded microspheres were formed via extrusion of the bacteria-polymer solution through a 26 G needle into a 0.05M CaCl₂ solution. The resulting microspheres were allowed to harden before they were collected and rinsed with sterilized water. Finally the microspheres were flash-frozen with liquid nitrogen and stored. See FIG. 15.

[0179] Survival of B. methylotrophicus 826 after freeze drying. In order to evaluate the survival of B. methylotrophicus after freeze drying, freeze-dried microspheres (0.1 g) were suspended and incubated in 9.9 mL of sterile modified phosphate buffer (Yasbin, Wilson et al. 1975) (Ammonium sulphate 0.2%, Potassium phosphate dibasic trihydrate 1.83%, Monopotassium phosphate 0.6%, Trisodium citrate 0.1% and Magnesium sulfate heptahydrate 0.02%) for 1 hour shaking at 250 rpm at room temperature to completely dissolve the microspheres. The viable cells were counted by spreading dilutions of the dissolved microspheres solution. Three technical replicate (three plates) were used to estimate the amount of CFU for each of the four replicate performed in the experiment.

[0180] Storage of microsphere at different temperatures. This experiment was designed in order to investigate the shelf life of encapsulated bacterial cells under various storage conditions. The freeze-dried microspheres placed into 50 mL falcon tubes and covered with aluminum foil to prevent light. The tubes were stored under three conditions: first at room temperature at 22° C., second in a fridge at 4° C. and third in a freezer at −15° C. Samples of microspheres (0.1 g) were withdrawn every 7 days for the first 56 days and then after 112 days of storage. Four biological replicates were used for each temperature condition. The samples were dissolved, diluted and spread plated on LBA agar plates to count viable cells. Freeze-dried bacteria, non-microencapsulated B26 were used as control. The cell suspension (0.1 mL) was transferred into a 1.5 mL centrifuge tube. The tubes were centrifuged using a microcentrifuge at 8000 rpm for 10 min and the liquid phase was removed. The tubes were freeze-dried for 48 h and stored in the same three conditions as the microspheres. To test for the viable cells, modified phosphate buffer was added to re-hydrate the cell pellets and incubated while shaking for 1 h following the same conditions as the microspheres. The viability of freeze-dried bacterial cells was tested every two weeks for the first 56 days. Three biological replicate were performed.

[0181] As shown in FIG. 16A the survival rate of free B. methylotrophicus B26 was stable at 15 C over 56 days, while cooler (4 C) and warmer conditions (22 C) led to the death of most bacteria after 28 days. In comparison, the survival rate of microsphere encapsulated B. methylotrophicus B26 bacteria dropped from 78% on day 7 after freeze dry treatment to 50% on day 112 after freeze dry treatment. While a storage temperature of 4 C seems to be less favorable, it does not seem to make a difference whether the microspheres are stored at 15 C or at 22 C (FIG. 16B).

### Example 15: Mode of Administration of Bacillus methylotrophicus B26 Microspheres

[0182] Re-inoculation and growth condition optimization. Brachypodium distachyon plants from the inbred line Bd21 (Brkljacic, Grotewold et al. 2011) and timothy (Phleum pretense) cultivar Novio seeds were surface sterilized according to Vain et al. (2008). Ten seeds were planted in each Pot (10×10 cm) containing sterilized Agro Mix® G6. Plants were stratified at 4° C. for 7 days after which they were placed in a climatically controlled chamber under a 16-h photoperiod with a light intensity of 150 μmoles/m²/s and a day/night temperature regime of 25/23° C. Plants were watered three times/week with sterile distilled water and fertilized every 2 weeks with N—P—K fertilizer 20-20-20/pot. Plants were thinned to five per pots after 21 days of growth and the experiment was kept for another 35 days. The experiment was repeated twice in different growth chamber.

[0183] Inoculation of plants with microspheres. Two different inoculation methods were evaluated for the use of B. methylotrophicus microspheres. In the first method called pre-planting or pre-inoculation treatment the microspheres were incorporated in the top 3 cm of the soil just before planting timothy and Brachypodium. In the second method called post-planting or post-inoculation treatment, microspheres were spread on the surface of the soil of already 21-day old non-inoculated timothy and Brachypodium plants. The amount of microspheres in both methods was adjusted to provide 5 million CFU per pot. Sterile microspheres devoid of bacteria were used as control.

[0184] Microbiological and molecular monitoring of B. methylotrophicus 826. Soil from the top 3 cm were sampled from both experiments on days 7, 21, 35, 49 and 56 post planting for the pre-planting experiment and days 7, 21, 35 post inoculation for the post-planting experiment in order to evaluate the population abundance of B26 in the soil (FIG. 17). Post-planting treatment means the treatment where a seed first grows to a plant and is then inoculated contrary to the pre-planting treatment where the seed is inoculated at the time of sowing Special attention was made to separate the beads from the soil samples in order to obtain the actual abundance of Bacillus estimated as colony forming units (CFU)/gram of soil fresh weight via serial dilution method and plating on LBA. Four biological replications/plant species/inoculation methods were performed each time.

[0185] FIG. 17A shows the bacterized (inoculated) and non-bacterized (non-inoculated) Brachypodium plants obtained with the pre-inoculation or pre-planting treatment and with a post-inoculation or post-planting treatment. FIG. 17B shows the concentration of Bacillus methylotrophicus B26 in top soil over the period of 56 days when Bacillus methylotrophicus B26 loaded microspheres are applied to topsoil at the time of seeding Brachypodium or timothy, i.e. according to the pre-inoculation or pre-planting treatment mode. FIG. 17 C shows the concentration of Bacillus methylotrophicus B26 in top soil over the period of 35 days when Bacillus methylotrophicus B26 loaded microspheres are applied to topsoil when Brachypodium or timothy plants have reached an age of 21 days according to the post-inoculation or post-planting treatment mode. Thus the pre-inoculation method was the preferred method.

### Example 16: Material and Methods—Phenotypic and Metabolic Responses of Timothy Grass Bacterized with Bacillus methylotrophicus B26 to Drought Stress

[0186] Maintenance and preparation of Bacillus methylotrophicus 826 inoculum. The Bacillus methylotrophicus strain B26, previously isolated from switchgrass and fully characterized (Gagne-Bourque, Aliferis et al. 2013) was maintained as described supra.

[0187] Plant material and growth conditions. A pot experiment was conducted in growth chambers between Jul. 23 and Oct. 29, 2014 at the Agriculture and Agri-Food Canada Research Centre in Québec, QC, Canada in order to compare the effectiveness of B. methylotrophicus B26 for promoting growth and yield of timothy grass (Phleum pratense) under drought stress conditions. Seeds (cv Novio) were planted individually in microcell tray (1.5×1.5×3 cm) (The Blackmore Company, MI, USA) containing a soil mixture (10:1:1) of commercial topsoil: Perlite (Holiday perlite; V. I. L Vermiculite Inc., Lachine, QC, Canada): peat moss (Pro-mix BX; Premier Peat Moss, Rivière-du-Loup, QC, Canada). The soil mixture was autoclaved for 3 h at 121° C. for three constitutive days prior to planting. The experiment was conducted in growth chambers (Conviron, Model PGR15, Controlled Environments Limited, Winnipeg, Canada) for 6 weeks under a 16 h photoperiod with a day/night temperature regime of 20/10° C. Seedlings were watered as needed.

[0188] At three weeks post-seeding, each seedling was inoculated by pipetting 1 ml of phosphate buffer containing 106 CFU of B. methylotrophicus in the soil surrounding each plant in the tray (FIG. 18). Non-inoculated seedlings (Control) received 1 ml of sterile phosphate buffer. Re-inoculation of plants with strain B26 was performed at 9 weeks post-seeding following the same procedure as previously described.

[0189] At four weeks post-seeding Plants (10 per pot) were transplanted in pots of 30 cm wide by 32 cm deep (TPOT3, Stuewe and Sons, OR, USA) containing 4 kg of the same soil mixture as previously described. Inoculated and non-inoculated plants were incubated in 4 separate growth chambers. Pots were rotated and randomized between the four chambers allocated for each treatment every week until the end of the experiment in order to avoid confounding treatment effects with a chamber effect. Following a 2-week establishment period (i.e. 6 weeks post-seeding), plants were cut at a 3-cm height (establishment cut). Pots were returned to growth chambers, incubated at day/night temperatures of 25/15° C. and stress treatment was initiated. Well-watered (WW) and water stressed (DRY) plants were created as follows: (i) inoculated and well-watered (ii) non-inoculated plants and well-watered; (iii) inoculated and water stressed and (iv) non-inoculated and water stressed. Well-watered plants received water to field capacity 3 times per weeks based on pot weight. Water stressed treatments were enforced by reducing the water to ¼ of the amount that well-watered plants received. All pots received 100 ml of a solution of 1 g/liter of N—P—K fertilizer 20-20-20 (Plantprod, Laval, Qc, Canada) once a week.

[0190] A first harvest (H1) was performed on half of the plants of all treatments after 4 weeks of withholding water (i.e., 10 weeks post-seeding) when approximately 80% of the plants reached early anthesis stage (Simon and Park 1983). The remaining half was cut at 3 cm-height and left to regrow for an additional 4 weeks (i.e., 14 weeks post seeding) under the same conditions at which time a second harvest (H2; 8 weeks of withholding water) was performed in order to simulate the sequential harvests that are standard management practices for timothy in the field (FIG. 18). During each harvest, destructive measurements were taken from 8 pots (80 plants) for each growth and watering stress levels combination. Biomass of root and shoot, stage of development, photosynthesis and stomatal conductance, carbohydrates and amino acids analyses were conducted on the same 4 pots. While soil moisture, water content of plants and microbiological and molecular tests were performed on the remaining 4 pots. Therefore data were collected from a total of 64 pots.

[0191] Forage biomass and development stage During each harvest, the above ground biomass of plants in each pot was cut and the remaining roots and stubble were thoroughly washed to remove all traces of soil. Forage and root biomass were dried at 55° C. for 72 h, weighed and ground to pass a 1-mm screen with a Wiley mill (model 3379-k35, Variable Speed Digital ED-5 Wiley Mill, Thomas Scientific, Swedesboro, N.J.). Powdered samples were stored in 90 ml screw cap containers (Thermo Fisher Scientific, Ottawa, On, Canada) at room temperature for carbohydrates and amino acids analyses. Four biological replicates, each composed of 10-pooled plants were used.

[0192] Photosynthesis and conductivity measurement, and Leaf water potential and soil moisture. The photosynthetic rate and stomatal conductance were measured on the youngest fully developed leaf of a representative tiller from each pot using the LI-6400XT portable photosynthesis system (LI-COR, Lincoln, Nebr., USA). A function was generated to calculate boundary layer conductance for this chamber depending on leaf area and flow rate. Photosynthesis (μmol CO₂ m2-1s-1) and stomatal conductance (mol H₂O m2-1s-1) were determined according to the instrument's own formulae.

[0193] Leaf water potential and soil moisture Two representative non-flowering tillers per pot were selected and cut below the fourth youngest mature leaf. The leaf water potential was estimated using the portable pressure chambers 3005F01 Plant Water Status Console (Soil Moisture Equipment Corp., Santa Barbara, Ca, USA). Soil moisture percentage of each harvested pot was measured using reflectometry sensor technology (FieldScout TDR 100 equipped with the 20 cm rods, Spectrum Technologies Inc., Plainfield, Ill., USA). A degree of co-regulation exists between stomatal movements which is linked to Leaf conductance (Jarvis 1976) and photosynthetic rates (Reddy, Chaitanya et al. 2004).

[0194] Detection, enumeration and quantification of B. subtilis 826. To ensure that B26 successfully and systemically colonized different plant tissues of timothy and that intracellular spread of B26 was sustained in the respective tissues, bacteria cell numbers and DNA copy number were determined in root and shoot tissues and in rhizosphere soil of inoculated and non-inoculated plants subjected or not to water stress. At each harvest, four plants/pot of each replicate of all treatments were randomly selected and shoots and roots were separated and pooled. Roots were gently shaken to collect rhizosphere soil. Collected tissues and soil samples were rapidly processed for B. subtilis abundance numbers using culture-dependent (CFU counts) and culture-independent methods (DNA copies). Irrespective of the method applied, all collected tissue samples were surface sterilized following a stepwise protocol of ethanol, sodium hypochlorite and water as previously described (Gagne-Bourque, Aliferis et al. 2013).

[0195] Homogenized tissue samples (200 mg) and rhizospheric soil (1 g) from WW and DRY treatments inoculated or not were serially diluted in phosphate buffer and plated on LBA (Skinner, Jones et al. 1952). Prior to dilution, rhizospheric soil was suspended in 9 mL of phosphate buffer, shaken for 30 min and incubated at 95° C. for 5 mins. Plates were incubated at 37° C. for 24 h. Colony forming units (CFUs) were determined and calculated to Log CFU per gram of fresh weight of tissue or soil. There were four biological replicates each consisted of four plants for each treatment. Root tissues of Harvest 2 were lignified and impossible to properly homogenize, and thus were not subjected to bacterial enumeration. The presence of B. subtilis B26 cells inside inoculated plants subjected or not to water stress was also confirmed by quantitative real-time PCR (QPCR) assays. Surface sterilized and freeze-dried plant tissues were reduced to powder in liquid nitrogen, and genomic DNA was extracted from 200 mg of powdered tissue using the CTAB method (Porebski, Bailey et al. 1997). Genomic DNA from B. subtilis B26 colonies was extracted by direct colony PCR (Woodman 2008). Briefly, single colonies were mixed with sterile distilled water, incubated at 95° C. followed by centrifugation and the supernatant was used as template DNA in conventional PCR assays. B. subtilis B26 amplicons from strain specific primers (Gagne-Bourque, Aliferis et al. 2013) were purified, cloned and used to build a standard curve for QPCR assays following (Gagné-Bourque, Mayer et al. 2015).

[0196] Carbohydrate and Amino Acid extraction Accumulation of solutes such as carbohydrates, amino acids as drought protection indicators is well known in grasses under drought stress (Spollen and Nelson 1994; Hanson and Smeekens 2009; Krasensky and Jonak 2012). At each harvest, 200 mg of dried ground material was incubated in 7 mL of deionised H₂O at 80° C. for 20 min. Tubes were then incubated overnight at 4° C. and were subsequently centrifuged 10 min at 1500×g. A 1-mL sub-sample of the supernatant was collected for quantification of soluble carbohydrates. All extracts were stored at −80° C. until analysis could be completed.

[0197] Soluble sugars and low degree of polymerization fructans. The soluble sugars sucrose, glucose, fructose, raffinose and low degree of polymerization (LDP) fructans (degree of polymerization [DP] 3 to DP9) were analyzed using a Waters ACQUITY Ultra Performance Liquid Chromatography (UPLC) analytical system controlled by the Empower II software (Waters, Milford, Mass., USA), and following the procedure of Piva et al. (2013) for conditions of elution and eluent collections. Peak identity and quantity of sucrose, glucose and fructose were determined by comparison to standards. The degree of polymerization of LDP fructans was established by comparison with elution time of purified standards from Jerusalem artichoke (Helianthus tuberosus L.) and the quantity was determined by reference to a fructose standard.

[0198] High degree of polymerization fructans High degree of polymerisation fructans (HDP), from DP 10 to DP 200 were analyzed using a Waters HPLC analytical system controlled by the Empower™ II software. Samples were centrifuged for 3 minutes at 16,000 g and kept at 4° C. throughout the analysis within the Waters 717 plus autosampler. HDP fructans were separated on a Shodex™ KS-804 column preceded by a Shodex™ KS-G precolumn (Shodex, Tokyo, Japan) eluted isocratically at 50° C. with deionized water at a flow rate of 1.0 mL min-1 and were detected on a Waters™ 2410 refractive index detector. The degree of polymerization of HDP fructans was estimated by reference to a standard curve established with seven polymaltotriose pullulan standards (Shodex Standard P-82) ranging from 0.58×10⁴ to 85.3×10⁴ of molecular weight. The concentration of both LDP and HDP fructans is expressed on an equivalent fructose basis.

[0199] Total Starch. Total starch was extracted with methanol from the non-soluble residues left after water extraction and quantified following a gelatinization and enzymatic digestion with amyloglucosidase steps (Blakeney and Mutton 1980). Starch was quantified as glucose equivalents following enzymatic digestion with amyloglucosidase (Sigma™ A7255; Sigma-Aldrich Co., St. Louis, Mo.) and colorimetric detection with hydrobenzoic acid hydrazide method of (Blakeney and Mutton 1980).

[0200] Amino acid Analysis Twenty-one amino acids were separated and quantified using Waters ACQUITY™ UPLC analytical system controlled by the Empower™ II software (WATERS, Milford, Mass., USA). The amino acids were derivatized using AccQ Tag Ultra Reagent™ (6-aminoquinolyl-N-hydroxysuccinimidyl carbamate). The derivatives were separated on an AccQ Tag Ultra column (2.1×100 mm) and detected with Waters ACQUITY™ Tunable UV detector at 260 nm under the chromatographic conditions described in Cohen (2000). Peak identity and amino acid quantity were determined by comparison to a standard mix containing the 21 amino acids. Results from amino acid determination were expressed as concentrations on dry weight basis (μmol g-1 DW). Cohen, S. A. 2000. Amino acid analysis using precolumn derivatization with 6-aminoquinolyl-N-hydroxysuccinimidyl carbamate.

[0201] Statistical analysis Timothy plants (10 plants per pot) were subjected to two watering levels. For each level, plants were inoculated or not with B. subtilis B26 and were harvested at two time points. At each harvesting date, 4 pots were processed for phenotypic and biochemical measurements and 4 other pots were processed for plant water content, microbiological and molecular measurements. Pots were put in a complete randomized design.

[0202] One-way ANOVA was performed using the JMP 10.0 software (SAS Institute, Cary, N.C., USA on phenotypic measurements (i.e., biomass, photosynthesis rate, stomatal conductance, water potential, and soil moisture), and on microbial abundance (CFU numbers and DNA copies). All experimental data were tested for statistical significance using Tukey HSD with a magnitude of the F-value (P=0.05). Each harvest was analysed separately.

[0203] Multivariate analysis was performed on the carbohydrate and amino acids contents. Data were combined into a data matrix that was subjected to multivariate analyses using the SIMCA-P+v.12.0 software (Umetrics, MKS Instruments Inc.) as previously described (Aliferis, Faubert et al. 2014). For the preliminary evaluation of data, principal component analysis (PCA) was performed. The detection of biomarkers was based on orthogonal partial least squares-discriminant analysis (OPLS-DA) regression coefficients (P<0.05) and standard errors were calculated using Jack-knifing with 95% confidence interval. The performance of the models was assessed by the cumulative fraction of the total variation of the X's that could be predicted by the extracted components [Q2 (cum)] and the fraction of the sum of squares of all X's (R2 X) and Y's (R2 Y) explained by the current component.

### Example 17: Phenotypic and Metabolic Responses of Timothy Grass Bacterized with Bacillus methylotrophicus B26 to Drought Stress

[0204] The successful establishment of the water stress was paramount to the success of this experiment. Soil moisture content (FIG. 25 A) and water potential (FIG. 25. B) were measured at both harvest time points in order to ensure that a significant difference was established in-between the treatments. At both harvests a significant and constant difference in water concentration between the two watering levels was observed.

[0205] Inoculation with endophytic B. methylotrophicus strain B26 significantly promoted both root and shoot growth under both well-watered (WW) and water stressed (DRY) conditions only at H2 time point (FIGS. 19A, 19B). Maximum response, up to 26.6% and 63.8% in shoot and root dry mass, respectively compared to the control was recorded under water stress conditions (FIG. 19B). Growth stimulation of timothy is most likely related to P solubilization and the production of indole-3-acetic acid (IAA) and the cytokinin zeatin riboside by strain B26 as we previously reported (Gagne-Bourque, Aliferis et al. 2013).

[0206] Plants inoculated with Bacillus methylotrophicus B26 resulted in higher photosynthetic rate by 55.2% and also in stomatal conductance by 214.9% under water stress conditions compared to the controls at H2 only (FIGS. 19C, D, E and F) leading to better survival, and greater root and shoot biomass compared to the non-inoculated plants grown under the same condition (FIGS. 19 A and B).

### Example 18: Successful and Stable Colonization of Timothy by B. methylotrophicus Strain B26

[0207] B. methylotrophicus B26 successfully colonized the forage grass timothy and influenced its growth under normal and water stress. Strain B26 efficiently colonized the rhizosphere and timothy roots and was also intimately associated with the plant since it could be isolated from the interior of root and shoot tissues of surface sterilized inoculated plants at both harvest points (FIG. 20). The success of internal and systemic colonization of timothy by B26 was confirmed by culture-dependent (FIG. 20A) and independent methods (FIG. 20B). Re-isolation and quantification of strain B26 by the plating method in different surface-sterilized tissues of well-watered (WW) and drought stressed (DRY) plants clearly demonstrate that B. methylotrophicus B26 can form sustaining and endophytic populations in roots, shoots as well as in the soil around the roots of timothy (FIG. 20). The presence of B. methylotrophicus B26 in different tissues of timothy was confirmed by QPCR in inoculated plants (FIG. 20B). An amplicon with the expected product size of 565 bp was successfully amplified using species-specific primers for B. methylotrophicus B26 from DNA extracted from each tissue type (FIG. 20C).

[0208] Population numbers of B26 in soil and timothy shoot and root tissues were similar ranging from log₁₀ 4.44 to 4.57 log₁₀ CFU at both harvests and so are the absolute DNA copy numbers which were sustained in the roots and shoots. These densities are comparable to what had been reported for Bacillus species including B. subtilis (van Elsas, Dijkstra et al. 1986; Rai, Dash et al. 2007; Ji, Lu et al. 2008; Liu, Qiao et al. 2009).

### Example 19: Robustness of the Model

[0209] To address the question regarding the comparison of individual amino acids and sugars of bacterized plants expressed to stress or not required the application of Principal component analysis (PCA).

[0210] Principal component analysis (PCA) was performed initially for the whole dataset revealing no outliers (data not shown). In a second step, orthogonal projections to latent structures-discriminant analysis (OPLS-DA) with a regression coefficients (P<0.05) was used. OPLS-DA revealed a strong discrimination between inoculated and non-inoculated plant (FIG. 26A) between the watering level (FIG. 26B) and between the two harvests (FIG. 26C). Furthermore, the tight clustering among biological replications confirms the robustness and reproducibility of the experimental protocol (FIGS. 21A and B).

### Example 20: Determination of Carbohydrate Metabolism in Bacterized Timothy

[0211] The inventors sought to determine whether the increased drought tolerance of timothy bacterized with B. methylotrophicus B26 is manifested in accumulation of key water-stress induced metabolites (Chen and Jiang 2010; Krasensky and Jonak 2012). The inventors assessed the differences in metabolite accumulation in shoots and roots in inoculated or non-inoculated timothy plants over an extended 8-week period of water deficit stress. Most experiments of this nature, to the best of the inventors' knowledge, are performed on young plants with treatments of withholding water not exceeding beyond 1 week (Timmusk and Wagner 1999; Sandhya, Ali et al. 2010; Arzanesh, Alikhani et al. 2011; Vardharajula, Zulfikar Ali et al. 2011).

[0212] In the present experiment, bacterized plants accumulated more total carbohydrates and total soluble sugars in shoots compared to roots of non-stressed and stressed plants (FIGS. 22, 23 and 24A). Inoculation of timothy with strain B26 improved most notably sucrose and fructan (labeled as HPM_L or HPM_R) contents of leaves under non-stressed and drought stressed conditions over a period of 8 weeks of withholding water, while glucose increased in plants leaves after 4 weeks and in root after 8 weeks of withholding water (FIGS. 22, 23 and 24). Such increases are directly linked to the presence of strain B26 and strongly indicate that B. methylotrophicus helps increasing biosynthesis of sugars that allow for better osmotic adjustment thus alleviate stress effect.

[0213] Drought stress frequently enhances allocation of dry matter and preferential accumulation of starch and dry matter in roots of some plants (De Souza and Da Silva 1987; Leport, Turner et al. 1999) as adaptation to drought, which can enhance water uptake (Farooq, Wahid et al. 2009). The prolific and extensive root system and dry mass (FIGS. 18 and 19) of inoculated plants ensured a sufficient water supply under drought conditions, however the presence of the endophyte did not generally improve total carbohydrates and contents of some soluble sugars but the osmotically active molecule, sucrose, was increased by 1.33 fold in inoculated roots after 8 weeks of withholding water.

### Example 21: Determination of Amino Acids Metabolism in Bacterized Timothy

[0214] A total of 21 amino acids were measured in shoots and roots of bacterized watered and stressed timothy plants. Many amino acids that are members of the aromatic, pyruvate, glutamate and aspartate families were produced in greater quantities in plants inoculated with B. methylotrophicus B26 under water-stress conditions (FIGS. 22-24). The majority of amino acids increased in shoots and roots of bacterized plants exposed or not to 4 week-period of water deficit (FIGS. 22 A and B), however the effect of inoculation on amino acid content was more pronounced in leaves under drought stress (FIGS. 22-23).

### Example 22: Determination of Aromatic Amino Acids Metabolism in Bacterized Timothy

[0215] The increased levels of histidine, tyrosine and phenylalanine were highly consistent in bacterized timothy plants that were exposed or not to 4 week-period of water deficit. (FIGS. 22 and 24).

[0216] Levels of these aromatic amino acids have been implicated in drought stress in maize and wheat (Harrigan, Stork et al. 2007; Witt, Galicia et al. 2011; Bowne, Erwin et al. 2012). Histidine, an essential amino acid required for plant growth and development, functions as a metal-binding ligand and as a major part of metal hyperaccumulator molecule leading to alleviation of heavy metal stress (Sharma and Dietz 2006), but also is reported to be play a role in abiotic stress (Harrigan, Stork et al. 2007). Tyrosine and phenylalanine are synthesized through the shikimate pathway and serve as precursors for a wide range of secondary metabolites, some of which are ROS scavengers (Less and Galili 2008; Gill and Tuteja 2010). Water deficit enhances the production of reactive oxygen molecules and the maintenance or increase in the activity of enzymes involved in removing toxic ROS to avoid cellular damage is regarded as an important factor in tolerance to dehydration (Chaves, Maroco et al. 2003). Both amino acids may serve as buffer antioxidants and as ROS scavengers (Gill and Tuteja 2010).

### Example 23: Determination of Branched Chain Family Amino Acids Metabolism in Bacterized Timothy

[0217] Valine, leucine and isoleucine, the branched amino acids increased in leaves and roots of bacterized timothy plants (FIGS. 22-24), however, their accumulation was most prominent in leaves of bacterized plants exposed to a 4-week period of stress (FIGS. 22 and 24) and in roots of bacterized plants exposed to an 8-week period of stress (FIG. 23).

[0218] These results support what has been previously reported in wheat and pea that branched amino acids play an active role in plant tolerance or avoidance mechanism to drought (Charlton, Donarski et al. 2008; Bowne, Erwin et al. 2012). Taylor and co-workers (2004. #866) stated that branched amino acids may provide a source of energy in sugar starved Arabidopsis, while Joshi and Jander 2009 #687) working also on Arabidopsis proposed that they can act as osmolytes thus increasing plant drought tolerance.

### Example 24: Determination of Aspartate Family Amino Acids Metabolism in Bacterized Timothy

[0219] Most notably was the considerable accumulation of asparagine in leaves of bacterized plants exposed to an extended 8 week-period of stress (FIGS. 23 and 24). Concomitant with asparagine, threonine accumulation in the same tissue was also observed. On the contrary, B. methylotrophicus improved threonine levels in roots of plants exposed to 4 weeks of stress only. Both tissues of bacterized plants that were exposed to hydric stress for 4 weeks and those that were well watered accumulated lysine. The levels of alanine, classified in aspartate family by Aliferis et al. (2014), decreased due to endophyte or water deficit stress in leaves (FIGS. 22-24). Taken together, there is no consistent endophyte effect on these amino acids levels between shoots and roots.

[0220] A similar trend was reported for water stressed tall fescue infected with the fungal endophyte Neotyphodium coenophialum (Nagabhyru, Dinkins et al. 2013). Aspartic acid, asparagine, threonine and lysine have been reported to accumulate in a range of plant tissues under stress (Barnett and Naylor 1966; Venekamp 1989; Kusaka, Ohta et al. 2005; Lea, Sodek et al. 2007).

### Example 25: Determination of Glutamate Family Amino Acids Metabolism in Bacterized Timothy

[0221] B. methylotrophicus B26 improved the content of glutamic acid and glutamine but not proline in plants that are water-stressed or not for an extended period of stress, while arginine increased in roots and shoots of inoculated plants exposed or not to 4 weeks of stress (FIGS. 22-24). As expected and in agreement with the literature, proline level in leaves and roots of non-inoculated plants substantially increased owing to water stress (Verslues and Sharma 2010), however inoculation with B. methylotrophicus did not improve proline concentration in the leaves and roots of non-stressed plants (FIGS. 22-24). This indicates that proline biosynthesis is not a mechanism used by B. methylotrophicus B26 to confer a greater drought resistance to timothy but the biosynthesis of proline precursors is.

[0222] Proline is one of the known markers of water and salt stress in plants. It is a natural osmoproctectant and is a major stress-signalling molecule (Chaves, Maroco et al. 2003; Krasensky and Jonak 2012). Proline accumulation in plants is usually coupled with increases in its precursor glutamic acid, ornithine and arginine (Ashraf and Foolad 2007).

### Example 26: Determination of Serine Amino Acid Metabolism in Bacterized Timothy

[0223] Inoculation of plants with B26 improved serine content under stressed and well-watered conditions, however, well-water inoculated plants accumulated more serine in both leaves and roots by 1.35 and 1.29 fold, respectively. Despite the increase of serine, one would expect that glycine content would have changed. Interestingly, levels of glycine in leaves and roots of inoculated non-stressed and stressed plants remained the same (FIGS. 22-24) indicating that the bacterium had no bearing on serine levels.

[0224] Serine is a precursor of the organic osmolyte glycine betaine, which accumulates in a variety of plant species in response to environmental stresses such as drought, salinity, extreme temperatures, UV radiation and heavy metals. (Ashraf and Foolad 2007). Studies on drought-stressed Bermuda grass and pearl millet also showed that glycine content in different plant tissues was not affected by drought (Barnett and Naylor 1966; Kusaka, Ohta et al. 2005).

### Example 27: Determination of γ-Aminobutyric Acid (GABA) Metabolism in Bacterized Timothy

[0225] The accumulation of GABA in shoots exposed to stress and roots of stressed and not stressed plants were improved by the presence of the endophyte (FIGS. 22-24). Levels of α-Aminobutyric acid (AABA) an isomer form of the bioactive β-aminobutyric acid (BABA) also involved in drought protection were unchanged. Similarly, pre-treatment of Arabidopsis with AABA failed to induce drought tolerance (Jakab, Ton et al. 2005).

[0226] The non-protein γ-aminobutyric acid GABA functions as an osmolyte and mitigates water stress (Kinnersley and Turano 2000), thus its levels would be expected to be greatest in tissues exposed to stress.

### Example 28: Determination of Contribution to Osmolytes Pool from the Internal Production of B. methylotrophicus B26

[0227] Plant associated bacteria may also exude osmolytes in response to stress, which may act synergistically with plant-produced osmolytes and stimulate growth under stressed conditions (Madkour, Smith et al. 1990; Paul and Nair 2008).

[0228] The osmolytes of B. methylotrophicus bacterized plants in response to stress are determined. The increase in certain osmolytes in inoculated stressed timothy plants can be, in part, created by B. methylotrophicus B26.

### Example 28: ACC Deaminase Production

[0229] The ability of plant growth promoting bacteria to produce 1-aminocyclopropane-1-carboxylate (ACC) deaminase (Azevedo et al 2000) to lower plant ethylene levels is a well-known mode of action that helps the plant to increase its drought resistance (Glick 2012). The bacteria consume ACC, a precursor of ethylene, via ACC deaminase thus lowering plant ethylene production. Ethylene is produced by the plant following different types of biotic and abiotic stresses (Glick 2014). Following stress perception, it is believed that plants produce ethylene in two successive “events”. The first “event” triggers the initiation of transcription of genes that encode plant defensive and protective proteins (Glick 2014). The second ethylene production “event” is generally detrimental to plant growth and is often involved in initiating processes such as senescence, chlorosis and leaf abscission. Thus the high level of plant ethylene can increase the effects of the stress. It this therefore believed that lowering the amount of ethylene production in the second “event” should decrease the amount of damage to the plant that occurs as a consequence of the stress.

[0230] The presence of ACC deaminase in rhizobial bacteria has been so closely linked to the potential to confer drought resistance to plants that a person skilled in the art of identifying drought resistance conferring bacteria would enrich for said bacteria by subjecting a soil sample to an ACC deaminase selection process. To the inventors' knowledge, there has only been one report in cucumbers where a consortium of three strains (Bacillus cereus AR156, Bacillus subtilis SM21, and Serratia spec XY21) has led to the induction of drought tolerance without the presence of ACC deaminase in any of the three strains (Wang et al 2012). However, it is unclear whether one strain on its own could provide these characteristics.

[0231] The inventor's tested the ability of B. methylotrophicus B26 to produce ACC deaminase both biochemically and genetically. A number of primers were designed from known ACC deaminase genes of Bacillus spp (specific primers) and from sequences of conserved regions designed from a mixture of bacteria (general primers). All the sequences used for the design of the primers are published on NCBI and summarized in Table 5. None of the primer pair sets led to the amplification of an ACC deaminase transcript in B26 suggesting that B26 does not express the ACC deaminase gene (FIG. 27).

TABLE 5
Primer sets used to amplify the ACC deaminase gene(s)

| Type | Primers | 5′ To 3′ |
|---|---|---|
| Specific | ACC1_Forward | CTGTTCCGAGTATCCCTATG (SEQ ID NO: 46) |
| | ACC1_Reverse | CGAGCAGATCACGATGTA (SEQ ID NO: 47) |
| Specific | ACC2_Forward | ACTACTCCGACACTGTATATG (SEQ ID NO: 48) |
| | ACC2_Reverse | CCAATGTCGAAACCTTCAG (SEQ ID NO: 49) |
| Specific | ACC3_Forward | CAGCAGGAAAAGGATTTGGG (SEQ ID NO: 50) |
| | ACC3_Reverse | ACTCCACTGAATTGAACCCG (SEQ ID NO: 51) |
| GENERAL | ACC_Gen_Forward | GCACAAGCACACACTTCATA (SEQ ID NO: 52) |
| | ACC_Gen_Reverse | AAGCGTGAAGACTGCAATAG (SEQ ID NO: 53) |

[0232] Three biochemical assays were used to assess the ability of B26 to use ACC as source of nitrogen. Bacterial growth on ACC as source of nitrogen indicates the ability of a bacterium to produce functional ACC deaminase. The three methods were described in detail in Penrose and Glick (2003).

[0233] The first method consisted in growing the bacteria in liquid culture in a rich media (LB) for 24 hours at 37° C. at 200 RPM and transferring 0.1 ml of the culture in 5 ml of DF salt media (DF) (Dworking and Foster, 1958) containing 2.0 g (NH₄)₂SO₄ as nitrogen source (FIG. 28A). The bacteria were left to grow for 24 h under the same conditions as described above. The bacteria were pelleted and washed in DF salt without nitrogen. Finally the bacterial pellet was re-suspended in 5 ml of DF salt media containing 3 mM ACC as source of nitrogen. The bacteria were left to grow again for 24 hours under the same conditions. Bacillus methylotrophicus B26 was able to grow in the DF salt media containing (NH₄)₂SO₄ but unable to grow in the DF media with ACC as source of nitrogen, which showed its inability to produce ACC deaminase (FIG. 28B).

[0234] In the second method bacteria were transferred and grown on DF-agar supplemented with 30 mMol ACC per plate after enrichment in ((NH₄)₂SO₄ containing DF salt medium. The plates were incubated at 37° C. for 48 hours. No growth was detected confirming that Bacillus methylotrophicus B26 does not produce any ACC deaminase (FIG. 28C).

[0235] The third method consisted in quantifying of ACC deaminase activity by measuring the amount of a-ketobutyrate, the reaction product of ACC cleaved by ACC deaminase. The a-ketobutyrate concentration was measured as absorbance at 540 nm of a sample compared to a standard curve of the product ranging from 0.1 to 1 μM. This method again confirm Bacillus methylotrophicus B26's ACC deaminase deficiency.

### REFERENCES

[0236] Agbessi S, Beauséjour J, Déry C, Beaulieu C. (2003). “Antagonistic properties of two recombinant strains of Streptomyces melanosporofaciens obtained by intraspecific protoplast fusion”. Appl Microbiol Biotechnol. August; 62(2-3):233-8.
[0237] Aliferis, K. A., D. Faubert, et al. (2014). “A metabolic profiling strategy for the dissection of plant defense against fungal pathogens.” PLoS ONE 9(11): e111930.
[0238] Araus, J. L., G. A. Slaffer, et al. (2002). “Plant breeding and drought in C3 cereals: What should we breed for?” Annals of Botany 89(7): 925-940.
[0239] Arkhipova T N, Veselov S U, Melentiev A I, Martynenko E V, Kudoyarova G R (2005) Ability of bacterium Bacillus subtilis to produce cytokinins and to influence the growth and endogenous hormone content of lettuce plants. Plant and Soil 272: 201-209.
[0240] Arkhipova, T., E. Prinsen, et al. (2007). “Cytokinin producing bacteria enhance plant growth in drying soil.” Plant and Soil 292(1-2): 305-315.
[0241] Arzanesh, M., H. Alikhani, et al. (2011). “Wheat (Triticum aestivum L.) growth enhancement by Azospirillum sp. under drought stress.” World Journal of Microbiology and Biotechnology 27(2): 197-205.
[0242] Ashraf, M. and M. R. Foolad (2007). “Roles of glycine betaine and proline in improving plant abiotic stress resistance.” Environmental and Experimental Botany 59(2): 206-216.
[0243] Azevedo, J. L., W. Maccheroni Jr., et al. (2000). “Endophytic microorganisms: a review on insect control and recent advances on tropical plants.” Electronic Journal of Biotechnology 3: 15-16.
[0244] Barnett, N. M. and A. Naylor (1966). “Amino acid and protein metabolism in Bermuda grass during water stress.” Plant Physiology 41(7): 1222-1230.
[0245] Bélanger, G., Y. Castonguay, et al. (2006). “Winter damage to perennial forage crops in eastern Canada: Causes, mitigation, and prediction.” Canadian Journal of Plant Science 86(1): 33-47.
[0246] Blakeney, A. B. and L. L. Mutton (1980). “A simple colorimetric method for the determination of sugars in fruit and vegetables.” Journal of the Science of Food and Agriculture 31(9): 889-897.
[0247] Boiero, L., D. Perrig, et al. (2007). “Phytohormone production by three strains of Bradyrhizobium japonicum and possible physiological and technological implications.” Applied Microbiology and Biotechnology 74(4): 874-880.
[0248] Bowne, J. B., T. A. Erwin, et al. (2012). “Drought responses of leaf tissues from wheat cultivars of differing drought tolerance at the metabolite level.” Molecular Plant 5(2): 418-429.
[0249] Brkljacic J, Grotewold E, Scholl R, Mockler T, Garvin D F, et al. (2011) Brachypodium as a model for the grasses: today and the future. Plant Physiology 157: 3-13.
[0250] Calvo, P., L. Nelson, et al. (2014). “Agricultural uses of plant biostimulants.” Plant and Soil 383(1-2): 3-41.
[0251] Canada, S. (2003). Livestock feed requirements study Canada and provinces 1999, 2000 and 2001. S. Canada. Ottawa, ON, Canada.
[0252] Cankar K, Kraigher H, Ravnikar M, Rupnik M (2005) Bacterial endophytes from seeds of Norway spruce (Picea abies L. Karst). FEMS microbiology letters 244: 341-345.
[0253] Carrow R (1996) Drought avoidance characteristics of diverse tall fescue cultivars. Crop Sci 36: 371-377.
[0254] Charlton, A., J. Donarski, et al. (2008). “Responses of the pea (Pisum sativum L.) leaf metabolome to drought stress assessed by nuclear magnetic resonance spectroscopy.” Metabolomics 4(4): 312-327.
[0255] Chaves M M, Oliveira M M (2004) Mechanisms underlying plant resilience to water deficits: prospects for water-saving agriculture. Journal of Experimental Botany 55: 2365-2384.
[0256] Chaves, M. M. (1991). “Effects of water deficits on carbon assimilation.” Journal of Experimental Botany 42(1): 1-16.
[0257] Chaves, M. M., J. P. Maroco, et al. (2003). “Understanding plant responses to drought—from genes to the whole plant.” Functional plant biology 30(3): 239-264.
[0258] Chen, H. and J.-G. Jiang (2010). “Osmotic adjustment and plant adaptation to environmental changes related to drought and salinity.” Environmental Reviews 18(NA): 309-319.
[0259] Choudhary D K, Johri B N (2009) Interactions of Bacillus spp. and plants—with special reference to induced systemic resistance (ISR). Microbiological Research 164: 493-513.
[0260] Colton-Gagnon K, Ali-Benali M A, Mayer B F, Dionne R, Bertrand A, et al. (2014) Comparative analysis of the cold acclimation and freezing tolerance capacities of seven diploid Brachypodium distachyon accessions. Annals of botany 113: 681-693.
[0261] Compant S, Clément C, Sessitsch A (2010) Plant growth-promoting bacteria in the rhizo- and endosphere of plants: their role, colonization, mechanisms involved and prospects for utilization. Soil Biology and Biochemistry 42: 669-678.
[0262] Compant S, Duffy B, Nowak J, Clement C, Barka E A (2005) Use of plant growth-promoting bacteria for biocontrol of plant diseases: principles, mechanisms of action, and future prospects. Applied and Environmental Microbiology 71: 4951-4959.
[0263] Compant, S., B. Duffy, et al. (2005). “Use of plant growth-promoting bacteria for biocontrol of plant diseases: Principles, mechanisms of action, and future prospects.” Applied and Environmental Microbiology 71(9): 4951-4959.
[0264] Couée, I., C. Sulmon, et al. (2006). “Involvement of soluble sugars in reactive oxygen species balance and responses to oxidative stress in plants.” Journal of experimental botany 57(3): 449-459.
[0265] Creus, C. M., R. J. Sueldo, et al. (2004). “Water relations and yield in Azospirillum-inoculated wheat exposed to drought in the field.” Canadian Journal of Botany 82(2): 273-281.
[0266] Da K, Nowak J, Flinn B (2012) Potato cytosine methylation and gene expression changes induced by a beneficial bacterial endophyte, Burkholderia phytofirmans strain PsJN. Plant Physiology and Biochemistry 50: 24-34.
[0267] De Souza, J. and J. V. Da Silva (1987). “Partitioning of carbohydrates in annual and perennial cotton (Gossypium hirsutum L.).” Journal of experimental botany 38(7): 1211-1218.
[0268] Dimkpa, C., T. Weinand, et al. (2009). “Plant-rhizobacteria interactions alleviate abiotic stress conditions.” Plant, Cell & Environment 32(12): 1682-1694.
[0269] Dordas C (2009) Dry matter, nitrogen and phosphorus accumulation, partitioning and remobilization as affected by N and P fertilization and source-sink relations. European Journal of agronomy 30: 129-139.
[0270] Draper J, Mur L A, Jenkins G, Ghosh-Biswas G C, Bablak P, et al. (2001) Brachypodium distachyon. A new model system for functional genomics in grasses. Plant Physiol 127: 1539-1555.
[0271] El-Afry, M. M., M. F. El-Nady, et al. (2012). “Anatomical studies on drought-stressed wheat plants (Triticum aestivum L.) treated with some bacterial strains.” Acta Biol. Szeg 56: 165-174.
[0272] Elbeltagy A, Nishioka K, Sato T, Suzuki H, Ye B, et al. (2001) Endophytic colonization and in planta nitrogen fixation by a Herbaspirillum sp isolated from wild rice species. Applied and Environmental Microbiology 67: 5285-5293.
[0273] Farag, M. A., C.-M. Ryu, et al. (2006). “GC-MS SPME profiling of rhizobacterial volatiles reveals prospective inducers of growth promotion and induced systemic resistance in plants.” Phytochemistry 67(20): 2262-2268.
[0274] Farooq, M., A. Wahid, et al. (2009). Plant drought stress: effects, mechanisms and management. Sustainable Agriculture, Springer: 153-188.
[0275] Fernandez, O., A. Theocharis, et al. (2012). “Burkholderia phytofirmans PsJN acclimates grapevine to cold by modulating carbohydrate metabolism.” Molecular Plant-Microbe Interactions 25(4): 496-504.
[0276] Ferreira A, Quecine M C, Lacava P T, Oda S, Azevedo J L, et al. (2008) Diversity of endophytic bacteria from Eucalyptus species seeds and colonization of seedlings by Pantoea agglomerans. FEMS microbiology letters 287: 8-14.
[0277] Figueiredo, M. V., H. A. Burity, et al. (2008). “Alleviation of drought stress in the common bean (Phaseolus vulgaris L.) by co-inoculation with Paenibacillus polymyxa and Rhizobium tropici.” Applied soil ecology 40(1): 182-188.
[0278] Gagne-Bourgue F, Aliferis K A, Seguin P, Rani M, Samson R, et al. (2013) Isolation and characterization of indigenous endophytic bacteria associated with leaves of switchgrass (Panicum virgatum L.) cultivars. Journal of Applied Microbiology 114: 836-853.
[0279] Gagné-Bourque, F., B. F. Mayer, et al. (2015). “Accelerated growth rate and increased drought stress resilience of the model grass Brachypodium distachyon colonized by Bacillus subtilis B26.” PLoS ONE 10(6): e0130456.
[0280] Gill, S. S. and N. Tuteja (2010). “Reactive oxygen species and antioxidant machinery in abiotic stress tolerance in crop plants.” Plant Physiology and Biochemistry 48(12): 909-930.
[0281] Glick, B. R. (2012). Plant Growth-Promoting Bacteria: Mechanisms and Applications.
[0282] Glick, B. R. (2014). “Bacteria with ACC deaminase can promote plant growth and help to feed the world.” Microbiological Research 169(1): 30-39.
[0283] Gontia-Mishra I, Sasidharan S, Tiwari S (2014) Recent developments in use of 1-aminocyclopropane-1-carboxylate (ACC) deaminase for conferring tolerance to biotic and abiotic stress. Biotechnology Letters 36: 889-898.
[0284] Gregory P (2006) Roots, rhizosphere and soil: the route to a better understanding of soil science? European Journal of Soil Science 57: 2-12.
[0285] H., H. M. and C. J. H. (2008). Agronoy facts 24 Timothy, Penn State College of Agricultural Sciences research and extension programs: 4.
[0286] Hallmann J, Berg G (2006) Spectrum and population dynamics of bacterial root endophytes. In: Schulz B E, Boyle C C, Sieber T, editors. Microbial Root Endophytes: Springer Berlin Heidelberg. pp. 15-31.
[0287] Hanson, J. and S. Smeekens (2009). “Sugar perception and signaling—an update.” Current Opinion in Plant Biology 12(5): 562-567.
[0288] Hardoim, P. R., L. S. van Overbeek, et al. (2008). “Properties of bacterial endophytes and their proposed role in plant growth.” Trends in Microbiology 16(10): 463-471.
[0289] Hare, P., W. Cress, et al. (1998). “Dissecting the roles of osmolyte accumulation during stress.” Plant, Cell & Environment 21(6): 535-553.
[0290] Harrigan, G. G., L. G. Stork, et al. (2007). “Metabolite analyses of grain from maize hybrids grown in the United States under drought and watered conditions during the 2002 field season.” Journal of agricultural and food chemistry 55(15): 6169-6176.
[0291] Hennig A., Kleinschmit J. R. G., Schoneberg S., Löffler S., Janβen A., Polle A. (2015). “Water consumption and biomass production of protoplast fusion lines of poplar hybrids under drought stress” Frontiers in Plant Science 6(330): 1-14.
[0292] Hong S Y, Park J H, Cho S H, Yang M S, Park C M (2011) Phenological growth stages of Brachypodium distachyon: codification and description. Weed Research 51: 612-620.
[0293] Hong S-Y, Seo P J, Yang M-S, Xiang F, Park C-M (2008) Exploring valid reference genes for gene expression studies in Brachypodium distachyon by real-time PCR. BMC plant biology 8: 112.
[0294] Hu, H. Q., X. S. Li, et al. (2010). “Characterization of an antimicrobial material from a newly isolated Bacillus amyloliquefaciens from mangrove for biocontrol of Capsicum bacterial wilt.” Biological Control 54(3): 359-365.
[0295] Huang B, Lv C, Zhuang P, Zhang H, Fan L (2011) Endophytic colonisation of Bacillus subtilis in the roots of Robinia pseudoacacia L. Plant Biology 13: 925-931.
[0296] Initiative T I B (2010) Genome sequencing and analysis of the model grass Brachypodium distachyon. Nature 463: 763-768.
[0297] Jakab, G., J. Ton, et al. (2005). “Enhancing Arabidopsis salt and drought stress tolerance by chemical priming for its abscisic acid responses.” Plant Physiology 139(1): 267-274.
[0298] James E K, Gyaneshwar P, Mathan N, Barraquio W L, Reddy P M, et al. (2002) Infection and colonization of rice seedlings by the plant growth-promoting bacterium Herbaspirillum seropedicae Z67. Molecular Plant-Microbe Interactions 15: 894-906.
[0299] Jarvis, P. G. (1976). “The interpretation of the variations in leaf water potential and stomatal conductance found in canopies in the field.” Philosophical Transactions of the Royal Society of London B: Biological Sciences 273(927): 593-610.
[0300] Ji, X., G. Lu, et al. (2008). “Biological control against bacterial wilt and colonization of mulberry by an endophytic Bacillus subtilis strain.” Fems Microbiology Ecology 65(3): 565-573.
[0301] Kasim, W. A., M. E. Osman, et al. (2013). “Control of drought stress in wheat using plant-growth-promoting bacteria.” Journal of plant growth regulation 32(1): 122-130.
[0302] Kempf, B. and E. Bremer (1998). “Uptake and synthesis of compatible solutes as microbial stress responses to high-osmolality environments.” Archives of Microbiology 170(5): 319-330.
[0303] Khan, N. H., D. R. Korber, N. H. Low and M. T. Nickerson (2013). “Development of extrusion-based legume protein isolate-alginate capsules for the protection and delivery of the acid sensitive probiotic, Bifidobacterium adolescentis.” Food Research International 54(1): 730-737.
[0304] Kinnersley, A. M. and F. J. Turano (2000). “Gamma aminobutyric acid (GABA) and plant responses to stress.” Critical Reviews in Plant Sciences 19(6): 479-509.
[0305] Krasensky, J. and C. Jonak (2012). “Drought, salt, and temperature stress-induced metabolic rearrangements and regulatory networks.” Journal of Experimental Botany.
[0306] Kusaka, M., M. Ohta, et al. (2005). “Contribution of inorganic components to osmotic adjustment and leaf folding for drought tolerance in pearl millet.” Physiologia Plantarum 125(4): 474-489.
[0307] Lea, P. J., L. Sodek, et al. (2007). “Asparagine in plants.” Annals of Applied Biology 150(1): 1-26.
[0308] Leme\check{z}ienė, N., J. Kanapeckas, et al. (2004). “Analysis of dry matter yield structure of forage grasses.” Plant Soil Environment 50(6): 277-282.
[0309] Leport, L., N. Turner, et al. (1999). “Physiological responses of chickpea genotypes to terminal drought in a Mediterranean-type environment.” European Journal of Agronomy 11(3): 279-291.
[0310] Less, H. and G. Galili (2008). “Principal transcriptional programs regulating plant amino acid metabolism in response to abiotic stresses.” Plant Physiology 147(1): 316-330.
[0311] Liu Q, Kasuga M, Sakuma Y, Abe H, Miura S, et al. (1998) Two transcription factors, DREB1 and DREB2, with an EREBP/AP2 DNA binding domain separate two cellular signal transduction pathways in drought- and low-temperature-responsive gene expression, respectively, in arabidopsis. The Plant Cell Online 10: 1391-1406.
[0312] Liu, B., H. Qiao, et al. (2009). “Biological control of take-all in wheat by endophytic Bacillus subtilis El R-j and potential mode of action.” Biological Control 49(3): 277-285.
[0313] Livak K J, Schmittgen T D (2001) Analysis of relative gene expression data using real-time quantitative PCR and the 2-ΔΔCT method. methods 25: 402-408.
[0314] Livingston III D P, Hincha D K, Heyer A G (2009) Fructan and its relationship to abiotic stress tolerance in plants. Cellular and Molecular Life Sciences 66: 2007-2023.
[0315] Lucy, M., E. Reed, et al. (2004). “Applications of free living plant growth-promoting rhizobacteria.” Antonie van Leeuwenhoek 86(1): 1-25.
[0316] Lugtenberg, B. and F. Kamilova (2009). “Plant-growth-promoting rhizobacteria.” Annual review of microbiology 63: 541-556.
[0317] Madkour, M. A., L. T. Smith, et al. (1990). “Preferential osmolyte accumulation: a mechanism of osmotic stress adaptation in diazotrophic bacteria.” Applied and environmental microbiology 56(9): 2876-2881.
[0318] Marulanda, A., J.-M. Barea, et al. (2009). “Stimulation of plant growth and drought tolerance by native microorganisms (A M fungi and bacteria) from dry environments: mechanisms related to bacterial effectiveness.” Journal of Plant Growth Regulation 28(2): 115-124.
[0319] Marulanda, A., R. Azcón, et al. (2010). “Regulation of plasma membrane aquaporins by inoculation with a strain in maize (L.) plants under unstressed and salt-stressed conditions.” Planta 2(232): 533-543.
[0320] Mei, C. and B. S. Flinn (2010). “The use of beneficial microbial endophytes for plant biomass and stress tolerance improvement.” Recent Patents on Biotechnology 4(1): 81-95.
[0321] Meister, R., M. S. Rajani, et al. (2014). “Challenges of modifying root traits in crops for agriculture.” Trends in Plant Science 19(12): 779-788.
[0322] Mena-Violante H G, Olalde-Portugal V (2007) Alteration of tomato fruit quality by root inoculation with plant growth-promoting rhizobacteria (PGPR): Bacillus subtilis BEB-13bs. Scientia Horticulturae 113: 103-106.
[0323] Miazek, A., J. Bogdan, et al. (2001). “Effects of water deficit during germination of wheat seeds.” Biologia Plantarum 44(3): 397-403.
[0324] Muurinen S, Kleemola J, Peltonen-Sainio P (2007) Accumulation and translocation of nitrogen in spring cereal cultivars differing in nitrogen use efficiency. Agronomy Journal 99: 441-449.
[0325] Nadeem S M, Ahmad M, Zahir Z A, Javaid A, Ashraf M (2014) The role of mycorrhizae and plant growth promoting rhizobacteria (PGPR) in improving crop productivity under stressful environments. Biotechnology Advances 32: 429-448.
[0326] Nagabhyru, P., R. D. Dinkins, et al. (2013). “Tall fescue endophyte effects on tolerance to water-deficit stress.” BMC plant biology 13(1): 127.
[0327] Nautiyal, C. S., S. Srivastava, et al. (2013). “Plant growth-promoting bacteria Bacillus amyloliquefaciens NBRISN13 modulates gene expression profile of leaf and rhizosphere community in rice during salt stress.” Plant Physiology and Biochemistry 66(0): 1-9.
[0328] Naveed, M., B. Mitter, et al. (2014). “Increased drought stress resilience of maize through endophytic colonization by Burkholderia phytofirmans PsJN and Enterobacter sp. FD17.” Environmental and Experimental Botany 97: 30-39.
[0329] Niu, D.-D., H.-X. Liu, et al. (2011). “The plant growth-promoting rhizobacterium Bacillus cereus AR156 induces systemic resistance in Arabidopsis thaliana by simultaneously activating salicylate- and jasmonate/ethylene-dependent signaling pathways.” Molecular Plant-Microbe Interactions 24(5): 533-542.
[0330] Ongena M, Jacques P (2008) Bacillus lipopeptides: versatile weapons for plant disease biocontrol. Trends in Microbiology 16: 115-125.
[0331] Orhan E, Esitken A, Ercisli S, Turan M, Sahin F (2006) Effects of plant growth promoting rhizobacteria (PGPR) on yield, growth and nutrient contents in organically growing raspberry. Scientia Horticulturae 111: 38-43.
[0332] Ortiz-Castro, R., E. Valencia-Cantero, et al. (2008). “Plant growth promotion by Bacillus megaterium involves cytokinin signaling.” Plant signaling & behavior 3(4): 263-265.
[0333] Parker D, Beckmann M, Enot D P, Overy D P, Rios Z C, et al. (2008) Rice blast infection of Brachypodium distachyon as a model system to study dynamic host/pathogen interactions. Nat Protocols 3: 435-445.
[0334] Parkinson J, Allen S (1975) A wet oxidation procedure suitable for the determination of nitrogen and mineral nutrients in biological material. Communications in Soil Science & Plant Analysis 6: 1-11.
[0335] Paul, D. and S. Nair (2008). “Stress adaptations in a plant growth promoting rhizobacterium (PGPR) with increasing salinity in the coastal agricultural soils.” Journal of basic microbiology 48(5): 378.
[0336] Penrose, D. M. and B. R. Glick (2003). “Methods for isolating and characterizing ACC deaminase-containing plant growth-promoting rhizobacteria.” Physiologia Plantarum 118(1): 10-15.
[0337] Pérez-Garcia A, Romero D, De Vicente A (2011) Plant protection and growth stimulation by microorganisms: biotechnological applications of Bacilli in agriculture. Current Opinion in Biotechnology 22: 187-193.
[0338] Porebski, S., L. G. Bailey, et al. (1997). “Modification of a CTAB DNA extraction protocol for plants containing high polysaccharide and polyphenol components.” Plant Molecular Biology Reporter 15(1): 8-15.
[0339] Poupin, M. J., T. Timmermann, et al. (2013). “Effects of the plant growth-promoting bacterium Burkholderia phytofirmans PsJN throughout the life cycle of Arabidopsis thaliana.” Plos One 8(7).
[0340] Québec, V. g. d. (2008). Rapport du Vérificateur général du Québec à l'Assemblée Nationale pour l'année 2007-2008. Québec, Institue du Vérificateur général du Québec. Tome 2: Ch. 1, p. 8.
[0341] Rai, R., P. Dash, et al. (2007). “Endophytic bacterial flora in the stem tissue of a tropical maize (Zea mays L.) genotype: isolation, identification and enumeration.” World Journal of Microbiology and Biotechnology 23(6): 853-858.
[0342] Ran, F. A., P. D. Hsu, et al. (2013). “Genome engineering using the CRISPR-Cas9 system.” Nat. Protocols 8(11): 2281-2308.
[0343] Reddy, A. R., K. V. Chaitanya, et al. (2004). “Drought-induced responses of photosynthesis and antioxidant metabolism in higher plants.” Journal of plant physiology 161(11): 1189-1202.
[0344] Reinhold-Hurek B, Hurek T (2011) Living inside plants: bacterial endophytes. Current Opinion in Plant Biology 14: 435-443.
[0345] Reva, O. N., C. Dixelius, et al. (2004). “Taxonomic characterization and plant colonizing abilities of some bacteria related to Bacillus amyloliquefaciens and Bacillus subtilis.” FEMS Microbiology Ecology 48(2): 249-259.
[0346] Richardson, M. D., G. W. Chapman, et al. (1992). “Sugar alcohols in endophyte-infected tall fescue under drought.” Crop Sci. 32(4): 1060-1061.
[0347] Rocha F R, Papini-Terzi F S, Nishiyama M Y, Vêncio R Z, Vicentini R, et al. (2007) Signal transduction-related responses to phytohormones and environmental challenges in sugarcane. BMC genomics 8: 71.
[0348] Rodríguez, H. and R. Fraga (1999). “Phosphate solubilizing bacteria and their role in plant growth promotion.” Biotechnology advances 17(4): 319-339.
[0349] Rosenblueth M, Martinez-Romero E (2006) Bacterial endophytes and their interactions with hosts. Molecular Plant-Microbe Interactions 19: 827-837.
[0350] Ruan, Y.-L., Y. Jin, et al. (2010). “Sugar input, metabolism, and signaling mediated by invertase: Roles in development, yield potential, and response to drought and heat.” Molecular Plant 3(6): 942-955.
[0351] Ryu, C.-M., M. A. Farag, et al. (2003). “Bacterial volatiles promote growth in Arabidopsis.” Proceedings of the National Academy of Sciences 100(8): 4927-4932.
[0352] Sakuma Y, Maruyama K, Osakabe Y, Qin F, Seki M, et al. (2006) Functional analysis of an Arabidopsis transcription factor, DREB2A, involved in drought-responsive gene expression. The Plant Cell Online 18: 1292-1309.
[0353] Saleem, M., M. Arshad, et al. (2007). “Perspective of plant growth promoting rhizobacteria (PGPR) containing ACC deaminase in stress agriculture.” Journal of Industrial Microbiology & Biotechnology 34(10): 635-648.
[0354] Sandhya, V., S. Z. Ali, et al. (2010). “Effect of plant growth promoting Pseudomonas spp. on compatible solutes, antioxidant status and plant growth of maize under drought stress.” Plant Growth Regulation 62(1): 21-30.
[0355] Sarma R K, Saikia R (2014) Alleviation of drought stress in mung bean by strain Pseudomonas aeruginosa GGRJ21. Plant and soil 377: 111-126.
[0356] Sharma, S. S. and K.-J. Dietz (2006). “The significance of amino acids and amino acid-derived molecules in plant responses and adaptation to heavy metal stress.” Journal of Experimental Botany 57(4): 711-726.
[0357] Simon, U. and B. Park (1983). “A descriptive scheme for stages of development in perennial forage grasses.”
[0358] Skinner, F., P. Jones, et al. (1952). “A comparison of a direct- and a plate-counting technique for the quantitative estimation of soil micro-organisms.” Journal of General Microbiology 6(3-4): 261-271.
[0359] Spollen, W. G. and C. J. Nelson (1994). “Response of fructan to water deficit in growing leaves of tall fescue.” Plant Physiology 106(1): 329-336.
[0360] Sun, L., Z. Lu, et al. (2006). “Isolation and characterization of a co-producer of fengycins and surfactins, endophytic Bacillus amyloliquefaciens ES-2, from Scutellaria baicalensis Georgi.” World Journal of Microbiology and Biotechnology 22(12): 1259-1266.
[0361] Sziderics, A., F. Rasche, et al. (2007). “Bacterial endophytes contribute to abiotic stress adaptation in pepper plants (Capsicum annuum L.).” Canadian journal of microbiology 53(11): 1195-1202.
[0362] Taji, T., C. Ohsumi, et al. (2002). “Important roles of drought- and cold-inducible genes for galactinol synthase in stress tolerance in Arabidopsis thaliana.” The Plant Journal 29(4): 417-426.
[0363] Timmusk, S. and E. G. H. Wagner (1999). “The plant-growth-promoting rhizobacterium Paenibacillus polymyxa induces changes in Arabidopsis thaliana gene expression: A possible connection between biotic and abiotic stress responses.” Molecular Plant-Microbe Interactions 12(11): 951-959.
[0364] Truyens S, Weyens N, Cuypers A, Vangronsveld J (2014) Bacterial seed endophytes: genera, vertical transmission and interaction with plants. Environmental Microbiology Reports.
[0365] Truyens, S., N. Weyens, et al. (2014). “Bacterial seed endophytes: genera, vertical transmission and interaction with plants.” Environmental Microbiology Reports 7(1): 10.
[0366] Vain, P., B. Worland, V. Thole, N. McKenzie, S. C. Alves, M. Opanowicz, L. J. Fish, M. W. Bevan and J. W. Snape (2008). “Agrobacterium-mediated transformation of the temperate grass Brachypodium distachyon (genotype Bd21) for T-DNA insertional mutagenesis.” Plant Biotechnology Journal 6(3): 236-245.
[0367] Valliyodan B, Nguyen H T (2006) Understanding regulatory networks and engineering for enhanced drought tolerance in plants. Current Opinion in Plant Biology 9: 189-195.
[0368] van Elsas, J. D., A. F. Dijkstra, et al. (1986). “Survival of Pseudomonas fluorescens and Bacillus subtilis introduced into two soils of different texture in field microplots.” FEMS Microbiology Letters 38(3): 151-160.
[0369] Van Loon, L. (2007). “Plant responses to plant growth-promoting rhizobacteria.” European Journal of Plant Pathology 119(3): 243-254.
[0370] Vardharajula, S., S. Zulfikar Ali, et al. (2011). “Drought-tolerant plant growth promoting Bacillus spp.: effect on growth, osmolytes, and antioxidant status of maize under drought stress.” Journal of Plant Interactions 6(1): 1-14.
[0371] Venekamp, J. (1989). “Regulation of cytosol acidity in plants under conditions of drought.” Physiologia Plantarum 76(1): 112-117.
[0372] Verslues, P. E. and S. Sharma (2010). “Proline metabolism and its implications for plant-environment interaction.” The Arabidopsis Book 8: e0140.
[0373] Vivas, A., A. Marulanda, et al. (2003). “Influence of a Bacillus sp. on physiological activities of two arbuscular mycorrhizal fungi and on plant responses to PEG-induced drought stress.” Mycorrhiza 13(5): 249-256.
[0374] Vogel J P, Garvin D F, Mockler T C, Schmutz J, Rokhsar D, et al. (2010) Genome sequencing and analysis of the model grass Brachypodium distachyon. Nature 463: 763-768.
[0375] Wahyudi, A. T., R. P. Astuti, et al. (2011). “Characterization of Bacillus spp. strains isolated from rhizosphere of soybean plants for their use as potential plant growth for promoting Rhizobacteria.” Journal of Microbiology and Antimicrobials 3(2): 6.
[0376] Wang W-S, Pan Y-J, Zhao X-Q, Dwivedi D, Zhu L-H, et al. (2010) Drought-induced site-specific DNA methylation and its association with drought tolerance in rice (Oryza sativa L.). Journal of Experimental Botany.
[0377] Wani, P. A. and M. S. Khan (2010). “Bacillus species enhance growth parameters of chickpea (Cicer arietinum L.) in chromium stressed soils.” Food and chemical toxicology 48(11): 3262-3267.
[0378] Whatmore, A. M., J. A. Chudek, et al. (1990). “The effects of osmotic upshock on the intracellular solute pools of Bacillus subtilis.” Journal of General Microbiology 136(12): 2527-2535.
[0379] Witt, S., L. Galicia, et al. (2011). “Metabolic and phenotypic responses of greenhouse-grown maize hybrids to experimentally controlled drought stress.” Molecular plant: ssr102.
[0380] Wolter A, Schroeder F-G. Effect of Drought Stress on the Productivity of Ivy Treated with Rhizobacterium Bacillus subtilis; 2012. pp. 107-113.
[0381] Wolter, A. and F.-G. Schroeder (2012). Effect of drought stress on the productivity of ivy treated with rhizobacterium Bacillus subtilis. International Symposium on Soilless Cultivation 1004.
[0382] Woodman, M. E. (2008). “Direct PCR of intact bacteria (colony PCR).” Current protocols in microbiology: A. 3D. 1-A. 3D. 6.
[0383] Wulff E G, van Vuurde J W L, Hockenhull J (2003) The ability of the biological control agent Bacillus subtilis, strain BB, to colonise vegetable brassicas endophytically following seed inoculation. Plant and Soil 255: 463-474.
[0384] Xu, M., J. Sheng, et al. (2014). “Bacterial community compositions of tomato (Lycopersicum esculentum Mill.) seeds and plant growth promoting activity of ACC deaminase producing Bacillus subtilis (HYT-12-1) on tomato seedlings.” World Journal of Microbiology and Biotechnology 30(3): 835-845.
[0385] Yang, J., J. W. Kloepper, et al. (2009). “Rhizosphere bacteria help plants tolerate abiotic stress.” Trends in Plant Science 14(1): 1-4.
[0386] Yasbin, R. E., G. A. Wilson and F. E. Young (1975). “Transformation and transfection in lysogenic strains of Bacillus subtilis: evidence for selective induction of prophage in competent cells.” Journal of Bacteriology 121(1): 296-304.
[0387] Zahir, Z., A. Munir, et al. (2008). “Effectiveness of rhizobacteria containing ACC deaminase for growth promotion of peas (Pisum sativum) under drought conditions.” J Microbiol Biotechnol 18(5): 958-963.
[0388] Zhang, S. and W. Outlaw (2001). “Abscisic acid introduced into the transpiration stream accumulates in the guard-cell apoplast and causes stomatal closure.” Plant, Cell & Environment 24(10): 1045-1054.

1. A method of increasing drought resistance of a plant, the method comprising applying a Bacillus methylotrophicus or a composition thereof (i) to the plant or to a part of the plant; and/or (ii) to an area around the plant or plant part, in an amount effective to produce an increased drought resistance in the plant as compared to the drought stress resistance of the plant in the absence of said application of Bacillus methylotrophicus or composition.

2. The method of claim 1, wherein the Bacillus methylotrophicus exhibits one or more of (1) an ability to form sustaining endophytic populations in all tissues of the plant as well as in the rhizosphere; (2) an ability to avoid triggering the plant immune system; (3) an ability to reduce signs of wilting in the plant or increase survival time of the plant in drought conditions; (4) an ability to increase expression of at least one drought-responsive genes in the plant; (5) an ability to increase starch in the plant; (6) an ability to increase total soluble sugars in the plant; (7) an ability to increase DNA methylation in bacterized plant; (8) an ability to increase expression of at least one DNA methyltransferase in the plant; (9) an ability to maintain or increase crop biomass of the plant; (10) an ability to maintain or increase photosynthesis of the plant; (11) an ability to maintain or increase water conductance of the plant; (12) an ability to increase total amino acids content in roots and/or in shoots of the plant; (13) an ability to increase amino asparagine, glutamic acid and/or glutamine content in roots and/or in shoots of the plant; and (14) an ability to increase non-protein amino acid GABA in shoots and/or roots of the plant.

3. The method of claim 1, wherein the Bacillus methylotrophicus exhibits one or more of (3) an ability to reduce signs of wilting in the plant or increase survival time of the plant in drought conditions; (4) an ability to increase expression of at least one drought-responsive genes in the plant; (5) an ability to increase starch in the plant; (6) an ability to increase total soluble sugars in the plant; (7) an ability to increase DNA methylation in bacterized plant; (8) an ability to increase expression of at least one DNA methyltransferase in the plant; (9) an ability to maintain or increase crop biomass of the plant; (10) an ability to maintain or increase photosynthesis of the plant; (11) an ability to maintain or increase water conductance of the plant; (12) an ability to increase total amino acids content in roots and/or in shoots of the plant; (13) an ability to increase amino asparagine, glutamic acid and/or glutamine content in roots and/or in shoots of the plant; and (14) an ability to increase non-protein amino acid GABA in shoots and/or roots of the plant, under drought conditions.

4. The method of claim 1, wherein the Bacillus methylotrophicus exhibits one or more of the characteristics (23) to (31) defined in Table 1.

5. The method of claim 1, wherein the Bacillus methylotrophicus is 1-aminocyclopropane-1-carboxylate (ACC) deaminase deficient.

6. The method of claim 1, wherein the plant is a poaceae plant, preferably a food crop plant.

7. (canceled)

8. The method of claim 1, wherein (a) the amount effective is about 1×10⁸ CFU or more/plant, plant part, or area around a plant or plant part; and/or (b) the Bacillus methylotrophicus is in a seed of a second generation plant infected with the Bacillus methylotrophicus.

9. (canceled)

10. The method of claim 1, wherein the composition of Bacillus methylotrophicus comprises a polymer wherein said polymer is mixed and extruded with said Bacillus methylotrophicus in a proportion of 10 to 1, and preferably the polymer is pea protein and/or alginate.

11. (canceled)

12. The method of claim 1, wherein the Bacillus methylotrophicus is of a strain comprising all of the biochemical characteristics of a Bacillus methylotrophicus deposited at the ATCC under accession no. PTA-122326 on Jul. 21, 2015, or a mutant thereof isolated from said strain and able to induce drought resistance to the plant.

13. A biologically pure culture of a 1-aminocyclopropane-1-carboxylate (ACC) deaminase deficient Bacillus methylotrophicus bacterium strain, or a mutant thereof able to induce drought resistance in a plant.

14. The Bacillus methylotrophicus bacterium strain, or mutant thereof of claim 13, wherein the strain or mutant thereof exhibits one or more of (1) an ability to form sustaining endophytic populations in all tissues of the plant as well as in the rhizosphere; (2) an ability to avoid triggering the plant immune system; (3) an ability to reduce signs of wilting in the plant or increase survival time of the plant in drought conditions; (4) an ability to increase expression of at least one drought-responsive genes in the plant; (5) an ability to increase starch in the plant; (6) an ability to increase total soluble sugars in the plant; (7) an ability to increase DNA methylation in bacterized plant; (8) an ability to increase expression of at least one DNA methyltransferase in the plant; (9) an ability to maintain or increase crop biomass of the plant; (10) an ability to maintain or increase photosynthesis of the plant; (11) an ability to maintain or increase water conductance of the plant; (12) an ability to increase total amino acids content in roots and/or in shoots of the plant; (13) an ability to increase amino asparagine, glutamic acid and/or glutamine content in roots and/or in shoots of the plant; and (14) an ability to increase non-protein amino acid GABA in shoots and/or roots of the plant.

15. The Bacillus methylotrophicus bacterium strain, or mutant thereof of claim 13, wherein the strain or mutant exhibits one or more of (3) an ability to reduce signs of wilting in the plant or increase survival time of the plant in drought conditions; (4) an ability to increase expression of at least one drought-responsive genes in the plant; (5) an ability to increase starch in the plant; (6) an ability to increase total soluble sugars in the plant; (7) an ability to increase DNA methylation in bacterized plant; (8) an ability to increase expression of at least one DNA methyltransferase in the plant; (9) an ability to maintain or increase crop biomass of the plant; (10) an ability to maintain or increase photosynthesis of the plant; (11) an ability to maintain or increase water conductance of the plant; (12) an ability to increase total amino acids content in roots and/or in shoots of the plant; (13) an ability to increase amino asparagine, glutamic acid and/or glutamine content in roots and/or in shoots of the plant; and (14) an ability to increase non-protein amino acid GABA in shoots and/or roots of the plant, under drought conditions.

16. The Bacillus methylotrophicus bacterium strain, or mutant thereof of claim 13, wherein the strain or mutant exhibits one or more of the characteristics (23) to (31) defined in Table 1.

17. A biologically pure culture of a bacterium strain comprising all of the biochemical characteristics of a Bacillus methylotrophicus deposited at the ATCC under accession no. PTA-122326 on Jul. 21, 2015, or a mutant thereof isolated from said strain and able to induce drought resistance to a plant.

18. A composition comprising the bacterium strain or mutant thereof defined in claim 13, and at least one carrier, preferably wherein the carrier comprises a polymer wherein said polymer is mixed and extruded with said bacterium strain or mutant thereof in a proportion of about 10 to about 1, and more preferably the polymer is pea protein and/or alginate.

19. (canceled)

20. (canceled)

21. A seed coated with the bacterium strain or mutant thereof defined in claim 13, or with a composition comprising the bacterium strain or mutant thereof, and at least one carrier.

22. A second or subsequent generation seed of a plant infected with a bacterium strain or with a mutant thereof, the bacterium strain or a mutant thereof being as defined claim 13.

23. A method of increasing a plant's growth, the method comprising applying the bacterium strain or mutant thereof defined in claim 13, or a composition comprising the bacterium strain or mutant thereof, and at least one carrier, (i) to the plant or to a part of the plant; and/or (ii) to an area around the plant or plant part in an amount effective to produce an increased plant growth as compared to the growth of the plant in the absence of said application of Bacillus methylotrophicus or composition.

24. The method of claim 23, wherein the plant is a poaceae plant, preferably a food crop plant.

25. (canceled)

26. The method of claim 23, wherein (a) the amount effective is about 1×10⁸ CFU or more/plant, plant part, or area around a plant or plant part; and/or (b) the bacterium strain or mutant thereof is in a seed of a second generation plant infected with the bacterium strain or mutant thereof.

27. (canceled)

The application's sequence listing, which the Patent Office published only in electronic form, follows.

SEQUENCE LISTING (53 sequences)

SEQ ID NO: 1 - DNA, 924100 bp, Bacillus methylotrophicus
ccccctcaagatgagatttcccattccgcaaggaagtaagatccctgaaagatgatcaggttgataggtctgaggtggaagtgtggcgacacatggagctgacagatactaatcgatcgaggacttaaccaatttgaatgtatgcttactgttatctagttttgagagaacactctcaatggtttggtggcgatagcgaagaggtcacacccgttcccatgccgaacacggaagttaagctcttcagcgccgatggtagtcgggggtttccccctgtgagagtaggacgccgccaagccattacacgcaagtgtaatatatggaggattagctcagctgggagagcatctgccttacaagcagagggtcggcggttcgagcccgtcatcctccaccattcctatcatacataagttggcttattaagccggtgtagctcaattggtagagcaactgacttgtaatcagtaggttgggggttcaagtcctcttgccggcaccacctttatatgttatactatataagtctcttgtaataagagccattagctcagttggtagagcatctgacttttaatcagagggtcgaaggttcgagtccttcatggctcaccattttttcttgcggatgtggcggaattggcagacgcgctagaatcaggctctagtgtctttacagacgtgggggttcaagtcccttcatccgcattgccaaacgcggaagtagttcagtggtagaacatcaccttgccaaggtgggggtcgcgggttcgaatcccgtcttccgctccaactatactataccatccatgccggggtggtggaattggcagacacacaggacttaaaatcctgcggtaggtgactaccgtgccggttcaagtccggccctcggcacttattgttgcgcccgtagctcaattggatagagcgtttgactacggatcaaaaggttaggggttcgactcctctcgggcgcgccatacatacttttgaaaacgggaagtagctcagcttggtagagcacatggtttgggaccatggggtcgcaggttcgaatcctgtcttcccgaccattttggggccttagctcagctgggagagcgcctgctttgcacgcaggaggtcagcggttcgatcccgctaggctccacttgattttaattgttttttggcggtgtagctcagctggctagagcgtacggttcatacccgtgaggtcgggggttcgatcccctccgccgctaccattggacctttagctcagttggttagagcagacggctcataaccgtccggtcgtaggttcgagtcctacaaggtccaccacttatacggaggaatacccaagtctggctgaagggatcggtcttgaaaaccgacaggggtgtcaaagcccgcgggggttcgaatccctcttcctccgccatatctaatttaattatcatcgcggggtggagcagttcggtagctcgtcgggctcataacccgaaggtcgcaggttcaaatcctgcccccgcaaccaaaaaatggtccggtagttcagttggttagaatgcctgcctgtcacgcaggaggtcgcgggttcgagtcccgtccggaccgccatttataacaaggctcggtagctcagttggtagagcaacggactgaaaatccgtgtgtcggcggttcgattccgtcccgagccaccatttaatttaatattgttttggcggttgtggcgaagtggttaacgcaccagattgtggctctggcactcgtgggttcgattcccatcaatcgccccaaacaacatgcgggtgtagtttagtggtaaaacctcagccttccaagctgatgtcgtgggttcgattcccatcacccgctccatttttatattgtcatgggcctgtagctcagctggttagagcgcacgcctgataagcgtgaggtcggtggttcgagtccactcaggcccaccatgatgatttttccacagtagctcagtggtagagctatcggctgttaaccgatcggtcgcaggttcgaatcctgcctgtggagccatacggagaagtactcaagtggctgaagaggcgcccctgctaagggtgtaggtcgtgtaagcggcgcgagggttcaaatccctccttctccgccataaggcccgttggtcaagcggttaagacaccgccctttcacggcggtaacacgggttcgaatcccgtacgggtcattaaaaaaaccttgcatactatgcaaggttttttattatgcgttcatagcgtaaatggtaaaagacaagtatgtggcaaaagcgctccataataaataaggaaccagaagccaggctgaagctttactgtatttaccggcaatgagcaacagaatgagtgttgtcacagccacaagcaggcaatcgatagatgcagcaagcaaatttttctgtgtgaattgaaaatagctgaatccttgattcacgatataattgatgagaagcatcacccaaaaagctttggattctttacatgaaaactttgcgtatatcaaggctgctgagagcgaaataagcgcaaacaaaaccgcccatatgatgccgatcactgatccgctcggcgtccagtcaggtttttgcagcgcgtcataccattcacggtcgatgggaaagagaacccccgctaaagaaaacaagacatatgtaatgataaatacaataatcgcaccgatatatttctttttcatttgttccctccgtcattcaatgtcaatacgttagttcccttttttggaaatattaaaccttttaaaaggttcatgcatcattaagtgtatgagttttcagtgtaaaaatgcagcaaaccatttatttgtattcaaaaaccccggcaggccggggttttaatcagcatgaagatcgccaaaggtcgtcataattccttcttcgtccagttcctgttcatatttttcgtgtgctttgcttggatacacggaaatgttttttccggtaatatctgtcgcgataaagttttcataatcctcagcatagccgatgttttcttctgagttcattgtcatatccccatagctgagcggaggatcctctaaatcctgaggcgtttctgagtttccgtattcctcaacatcctgataagcatcttcactatcgtaagtcgcccggattgattcatcatcatcaaattcaaactgtccgaacggtgtttcctcctcaatcggcctgtctttggaaacggcatcctgcgaggaatattccgccaatgtcgtagccgtcggcagagcttcgagtctgtcataaggaatgtccttgccgctgacttcacatgtgccgtatgtgccgttttcaatttgtttcagagagtaatcaatgtcgcgaaggtgctcccgttcatggtcgagcagagccaggtctttttcccgctcgtataattcggtcgcctgatcgccgggatgattgtcataggaagacaattcgccggatgactgatacgggaattcatcagctaactgaaattgatcattttctttaaagcggcttaaaatatcatgtctggcttcttccaattctttttttaagtgtgtgatctgttcgtttgtaagcacatcaatccctcgtttctatgtgatgcttactgttagtatgaacgcttttgcgcagaaaaatggtggataaaaatagtcattttcccatgaggaagtaaaaggatacagtgattgccgagagtggggaaagaaaattcaagtttgtttctttattcatttgcgcaaaaaggtttataataagaaatgcaggcattttgtcgtgctcacatctgtgtgtttgacacaaagtcatcacaggtgtattgtattaaaagcatttaacggattatggaggaatgtctcatggtgacaacggtgcagcatacgttccgagaggaagcagatcatgcattacataaagccaaacaagtcaaccatgctgtcttattgagctattcaagacgtattgcgtctttagaccctctatcatttttcaaagacggagcaaaaaaatataaaggcaaacgatttttttggtcagaacccggtagtgaattaacaatagtcggtcttggcacagaagcgctgttccaatcgaatgaaaaaaatggaaagcgttatcacgacgtttttgaacaatgggagcgctttaaaaagacggcttttcatattcatgaagaagaagaggcggcgcataccgcggtcggccctgtcttattcggcggtttttcatttaatcccgctgaagagagaggagacgaatggaacgggttcgaagaaggactgttctttatcccctcactcatgctgacaaagacggcagatggtgattatttaaccgtcaatcaatgggcggcagacggtaatcaggcagaagatacgctgaaacgtctgaaatctttttcggaagctttttcagtttcttcaatcgagtatgaagaatatcctgttttaacaaaagcggaagaacttgatgtggaaaactggcttgaagccattaaaacagcaacaaatgatatgaaagcaaatcaatatgataaagtcgtgctggcaagggaagtcgttttgtcatatgatgggcctattccggcggagagcgttgtccgcaagcttttgaaggaccaaacgacaagctatgtttttgcgattgagcagggagataaatgctttgtcggcgcttcaccggaacggctgatcaaaaaatccggcaaagacgtcatgtccacctgtctggcaggttcaattaagcgcggagaaaatcaacaagaagatgagcgtctcggcaaagagctgctgcatgacgaaaaaaatctcgcggaacatgattttgtggttcagatgatacacgattctttcttgtcgagctgcagcgatgtgaaaaagcctgcaggtccgcaattatataaaacgaaaagtgttcagcatctatatacaccgatcacaggccatcttaaaacgtccgcttcgctgtttgatttaattgaaaagctgcatcccacaccggcattgggcggagctccccagcagaaagctgttgaagttatcgctgatattgaaccgatgacacgtggatggtacgcggcaccgatcggctggatggacggcagggaaaacggagaatttgtcgtggctatccgatcagggctgattgaaggcaaaagtgcgcggcttttcgcaggctgcggcattgttgaagattcagatccgcaatcagaatatgaagaaacacaaattaaactaaagccgatgatctctgctttaggaggtgaaaggctttgacaaacccgattacacattatatcggaagttttattgatgaattcgctctatcgggtgtcaccgacgcagttgtttgcccggggtcgaggtcaactcccttggcggttttggcggcggcccacccggatattcaagtccatatacagattgatgaacgatccgcaggttttttcgcactcggtcttgcaaaagcccgccagcgtccggtcatgctgatttgtacgtcaggaacggcggcggctaacttctatccggccgtgattgaagctcattattcaagagtgcctcttattgtcctgactgctgaccggcctcatgaattgagggaagtgggggcgcctcaggcgattaaccagcattttctgttcggtaactttgttaagtttttcacagactcggctctgcctgaggaaaatcctcaaatgctgagctatatcagaacattggccggcagagccgtaagtgaagccgggaagcgcccgatggggccagtccatatcaatgtgccgctcagagagcctttgatgccggatttatcagccggaccttttgaaagaatgagaaaggggcggcacgtctcagtcacaacagggattcagtcagctgctcaagactctctctgtcatattacagagcgtctcgcgggtaccgaaagaggtatgatcgtctgcggcgaaattcacggtgaagcagaaaagcagcaaatcatcgcgcttgccgagatgcttcagttcccgattttggctgatccgctttcaaacctccgaaacggggagcatgataagacgctgattattgatgcttatgactcgtttttaaaagatgaagaaataaaagaggcgctgcgccctgacgctgtgatccgcttcggtccgatgccggtttctaaaccgctctttttatggctcagagatgatcctgccattgagcagtttatcgtcgatgaagacggaggatggagagatcccacccaggccggcgcgcatatgattcattgccatccgtcggtgtttttggaagcggtccgttcagctgaaaccggaaagcggccgtccggatggcttgagaaatggcagtttgtcaatgagcgtttccggagtcatttacaggacgcgagtatggatgatttatcatttgaaggaaatgtatatcgtcagcttcagcaccttgtccctgaaggcagttcgatttttgtcggaaacagcatgccgattcgcgacgtggatacgttctttgaaaaacaagatcgctccttccgtgtctatgccaaccgcggcgctaacggaattgacggagttgtctcctcggctatgggactgtgtgaaggtacaaaagctcctgtcacgcttgtcattggagatttatcgttttaccatgatttaaacgggctgttagcggctaaaaaacttggaattccgcttacggttattttaataaacaatgatggcggcgggattttctcgtttttgccgcaggcatctgataagactcattttgaagaactgttcggtacgccgacgggtcttgatttccggcatgccgccgcactgtacggcgggacgtatacttgccctgagacatgggaagcatttaaggatgcgtatcagccgcaggcggacaagcccggacttcatataatcgagctgaaaacagatcggacatcaagagttcaattccatcgcgatctgctgcaggccgcagtgcgggaagtgaaaaaagaatggaaactgtaacagttaaaacggccgacggcgtatgctatcgtgctgctgatagcggacacgaatcatctgaagctattgtttgtctgcatggatttacgggcagcaaagaatcatggatgtttttacgcggcatgtttcccggcgaacgaatggtgatgattgactgcctgggtcacggggagacagacgcgcctgtgcaagcggcaaggtacagtgcgagccggcaggttgcggaccttgccgccgtttttgatcaattaaaacttcacaaagtgaaacttattggttattctatggggggaagacttgcgtattcctttgcacaggcatttccgcatcgggtgtcagcgcttgttttggaaagtacaaccccgggcctcagcacgcttcaggaacgcaaaaagcggattcagtcagaccggaagcttgctgactttatattgcgggaaggtataacatcgtttgtcgattattgggagggcattccgttgtttgccacgcagctttctctgccggacagcgtaaaggcgtccatccgtgccggcaggatgaaaaataatccgtccggacttgcaggcagcctgctcggaatggggacgggctcacagccttcctggtgggaggcattacaccgcatcaaagcacccgttctgctcatatgcggtgaatgggatgaaaagttttgcgctattaatcaaaaggtgcataacctgctcccatcaagtaaaatagagattgtcaaacaggcggggcacacggtacatgtggaacagccgcgaatttttggtaagatagtaagtgagtttttatacggcttgtaaagcataaagaaatagcttttcggccggactcaggcaaaaatgaaggaggtcatatcaatggctgcagaatggaaaagtgaacgtcagtacgatgaaatcctgtacgagacgtataacggtattgcaaaaataacaattaaccgcccggaggtacataacgcatttactcctaagacggtatcagaaatgattgacgcgtttgctcgtgcgcgtgatgactccaatattggtgtcatcgttcttgcgggagcgggagataaagcattctgttcaggcggagaccaaaaagtccgcggtcacggcggatatgtcggagacgatcagatcccgcgtctgaatgtgcttgatcttcagcgtttgatccgtgttattcctaaaccggtcgtagcaatggtatcaggctatgccatcggcggaggccatgtgcttcatatcgtctgtgatttaacgattgcggccgataacgcgattttcggccaaaccggaccgaaagtgggaagctttgatgccggttacggctcaggttacctggcgcgtatcgtcggacataagaaagcccgtgaaatctggtacctgtgccgtcaatacaacgcgcaggaagcgctcgacatggggcttgtcaatacggttgtcccattagagaaacttgaagaggaaacaattaaatggtgtgaagaaatgcttgagaaaagccctacagcccttcgtttccttaaagcggcatttaacgcagatacagacggcctcgccggaattcagcaatttgcaggagatgcaacgcttctttattacacgactgacgaagcgaaagaaggccgcgattcctttaaagagaaacgcagtcccgatttcggtcaattccctcgttttccgtgatcagatgacactacgaaacagcttgagccgctctggtccaagctgttttcttttcaaaaacagtacttttacctcggagatgataacatgctgacagaacagccgaattggctcattcaaagggctcagctgacaccagagagaatcgctctcatatttgaaaacaaacagatgacattcagagaattatatcatgcttctaaacaaatggccgcgcggctgtccaaatactgctcgcttaaaaaaggagaccgggccgcgattttgctttctaacagaccggaaatggtttatgccgttcacgcctgcttcttattaggggcggaagctgtgctgttgaatacgaagctctcaaaacaggaacggttgtttcagctcgaagattcacaggcaaagcttttattgacggaggacggtttttgccgcgaagattatgaatctgcggtcgccgctgcggacgtggacgagctgcaggccaaagccgcgggagacattgaacctgaagcttatgtaacgcttgatgatacggcgactcttatgtatacgtcaggaacaacgggaagaccgaagggggtgcagcagactttcggtaatcattattccagcgctgtatcgtctgcgctgaatctgggggtcacggagcgggaccgctggcttattgcgctgccgctgtttcatatcagcggtctgtctgcgctgtttaagtcggtcatttacggcatgcctgtcgtgcttcatcaaaaattttctgtcactgatgtgctggacagcatcagctcccatcaggttacgatcatttcagcggtgcagaccatgctttcgggcctgcttgcggaaactgaacaatgtcctgaatcactgcgctgcattctgcttggcgggggtccggcaccgctgccgctcctcgaagaatgccgcaggaaacaatttccggtattccaatcttacggcttgactgaaacctgctcacagattgtcacgctttctccggaattcagcatggacaagctcggctcggccggtaaaccgctgttttcatgcgaaattagaattgaaaaagacggaaacccttgtgcgccgtttgaacacggtgaaattacggtgaaaggcccgaatgtaatgaaagggtattaccatcgtgacgacgcaaaccaggccgcttttcataatggatggtttaaaacaggcgatcttggctatttggatgatgaagggtttttatacgtgctggacaggcggtcggacctcattatttcaggcggagaaaacatctacccggcagaagtggaagcggcgctgcttgcccatccggctgtagcggaggccggtgtttcgggagccgaagatccgaagtgggggaaagtgccgcatgcttttctcgtgctgacttcttctgtcagttctgaggagctgaccgccttttgccgtgagcggcttgcaaaatataaaataccggctgcttttttcgaggttgacgggctcccgcggaacgcgtccaataaactgatgagacatcggctgaatgagcttcgtaaaggagaattgtcatgattaagattgaaaaaatcaccctttatcatgtaagtatgaggctgaaaaaaccgtttaaaacaagtattgaaacgctgcaggaccgtaaatttttgatcgtggaagcgatcgatgaaaccgggagaaccggctggggggaggtatcggcgttttcttctccatggtatacagaagaaacgattcagacatgcgcgcatatgctgagagattttttcatcccaaatgtcgtaggccgcgagtttttccatccgtcagaagtgcctgacagtctcgcgcgtttcaaaggaaaccgcatggcaaaagcggggctggaatcagccgtgtgggatctatatgccaagaaaaaggggatatctctcgcagaagccttagggggcaaaagagataaagtgcccgccggcgtggcggtgggtctggcttcggctgatgagatgcttcgggaaattgagcaatacgtaaaagaaggttatcaacgtataaaaataaaaattcagcccggccatgacgttgatctggtcagagccatccgcagccgttttccgaacgtaccgctgatggcggatgccaactcggcatatgaactgaaagacatcagcaggctgaaagagttggatgaattccagctcatgatgatagaacagccgcttcaagcagatgatattgtcgatcaccgccacctgcagaaacacttgagaaccgcggtatgccttgatgaaagcatatgctcatatgatgacgcaaggcgggcgattgagcttgggagctgtaaaatcattaacataaaaccggcgcgtgtaggaggcctgacagaggctttaaaaatacatgacttatgcagagagcatcacatgccggtttggtgcggcggaatgtttgaaaccggcatttcgagagcgcagacagtcgcgcttgcttcgctgccgcaatttacgataccgggtgatatttcctcatcagaccgatactgggaggaggatattgtcactcccgacatgcggatcgaagagggattcatctctgttccggacggtcccggactgggtgttgaagtcaatcaggaaataatgagaaaatacgtcacccaaatggacgtttttacgacaaacaactgataaaaagacatttcagcgagttgagctgcctgtatgctgctgttatattgaaattgttcatcatcaccccttcccccgtttgaaccggctgtatcagccggtttttttaataggcggatgcgatgatttttttattcttcaaacagtgtcggctttacatcgcaggtgttgctttctggctgggcaaacatgtacatcttgataaaaaattctgtgcttgtcatgaatgcgatactgatcgtaccgtcagccgcctatatttgccgacgaaccgcctttctgccatgcttctcatccgcgcgattttccccggctcaagggctgatttcaaaaaggcttgcggcacggaaatgaaaaagagctgtataaaacagctcttttcttttataaatcatgcggtttaaaggttttgcaatccgtttcttcacttttttcagcggtttcgcctgtatggctgaccacataaatcgcgtcggccgtgcatttgtttcctctgccccaatatgaacagttattgacttcacacagaattttttggtccatgctggctcccctccaagataaaaggtacgccattagtatgagccgccctgatttttgttattcctcctggcggatataacgtctgtctttcataaagagcttccagaagaaataaaacccgggaaacaaaatgatgaaagcgacgatatacgtcataaacagcgccctgaaggttgccggctccgtaaatcctgacatgaccgtaatatccggataaatcatataaggaagatgcgcccgtccgtatgcatagcttgccagaaagtattgaagcgcaatggcgatcatggcgattctcggtttgccgaggttgcggccgaagcgcttattcggcaaaaacagagccgcgccggcaatgataaatgtaatgacagacagaatgagccatgtcttgtctttcatcatccccgtatacagccagccggcttcagagcgtaatgtcagcataatgaagaaggcgaaaagaagcgacagcggccctgttagtaaagagctccgtctgtagatgcggtacgcatgctcctcttccgcaacatttgaaaaatcggccagaagcagtgaagataaaaataaagtgcttaaaatggcaaagccgataaacgcatacgcattaaggcttgtaaagacatttgccaaattcaggtgatacacgccgcccgtcttctcaataaatcctccgtgtgtgaccggaaggaccaaaatcagcacagcgggaataataaagcccgaaattccggagatatatctcatgatttttctttccttcgccgtattggagaaaacgagaaagccgctgcggatggctaaaagcagcaaaataatactccccgggatcaataaaacggttcccagcacgaaggttgcccctggaaagaagctgaatagggcgacaacgattgcgacgataaagacgttggtcacttcccatgtcggggacaaataacggttggcgatgtttgtcgcctttgtttgttctttatttaaataaatcatcgaccaaaagccggctccgaagtccatcgttgccatgaccgcgtagataaacacgaagccccatacgattgatatcgcaatgagagcatccatggtaatgtccattttaattcagccctttctatagttaggattccgccgcttttacatcctcctcaacgggatgtttgcggaaataataaagcagcacataaatgactgcggctgccaaaatggcgtaaacgaccgtaaacaggatgaacagcaaaccgattgaaccggttgtcgtgacgacatcagacgttttcaagagatggtaaatcacccatggctgccgccccgtacaagcgaatatccacccgaattcaattccgatcagactgagcggtcctgcggttaaaaataaaatcaaaagccaagtcggaaagctgtctttctttaaaatttttctccacacgatgccgatgattgagtacaaaatgagcagcatcccgatgccgaccattccgttaaacagtgtatggatgaataaaggcggccactcgtctttcggaaacgcgttcaatcctttgacgacggtatcaaagctgtttgcagccaaaaagcttaaagcccacggcacttctatcgcccattttactttttcttcttttgcatcagtaaaacccccgatcgcaagcggagcgtgtgatctagtttcaaacagcccttctgcgcccgcaagcttctcaggctggtattcgtaaagaagctgggctgactcgtgaccgtttaaagaggcaataatggagaatatcccgccgatcgttaaggcgagcagcagcgcttttcggtgaaagcggtatacctgctcctgttttctcgttctcagcattttataagccgcaactgacgcaacgataaatgccccggtcatgaaagccgtcagtacgacatggcccgcggtggtgaaaaagcttggattaaaaaacgctgcccaaggttcgacgtcagtgattttgccgtttaaaattttaaagccggccggcgttccttcaaatgcgtgaacatttgtgattaagacggcagatgccgcggcgccgatcaaaacgaaaataacggcaatgatgcgcatcgccggagtcagccggtcagcggcgtagacataaatggacataaacagcgcttcgataaagaaagcataaatttcaatctgaaacgggagtgacatcaccctgccgatgacctccatgaatccgggccacaaaagggcaagctgtgtacccgcgatcgttccggtcggtatcgccacgccgagcagaacagcctgcgccttcgtccaccttttcgccataatggcataatgcggatcttttgttttttgataaatcaattcagccattaaaatcatcagaggcaagccgacaccaagcgtcgcaaaaataatatgaaagcccatggttgtcccgaacagacttctggctaatactaaatcatccacgatcataaaccgcctttctaaattaccgttttatgtaatgtggttatattatttgctgaagcgattagattattcttccgattccatatatgtgcagggtttagaaatcaagggatcagggcatgtatgattgacaagcgggtatttaaggtttaaaataaaacgtaattattacgatttgagaaagggagatcagcatgaaaaaagatattcatccggataaccatcaagtgatttttcaagatgtgaacagcggctatcgctttttaagccattctacgaaaacgtcagcggaaacggcagagtgggaagacggaaaaacatacccgctgattaaagtagaagtcagctcagatacccatccgttttatacaggccgccaaaaattcaacgaaaaaggcgggagagtcgaacagttcaacaaaaaatacaatatggggaaataagacaagcccaatggggtttgtcttatttattgagcactttgtcatctcgtgcggggagtgacgaaatgacccgtcttatgttatattgtgaataaaaaagcagaaaggaaacaccaagatgagtcttctaaacgatatcatgcaatttaatgagcagttcactaaaaacaaagattatgaaaaataccaaacatctaaattcccggataaaaagatggcgattttgtcctgtatggacacacgtcttgtagaattgcttccgcatgcgatgaacatgcgaaacggcgatgttaaaattattaaaagtgccggcgcgcttgtcgcccacccgttcggaagtatcatgcgcagccttttagtggccgtatacgaattaaacgccgatgaagtctgcgttatcggccaccatgattgcggcatgagcaaaatcaacagcgaggatatgctcgataaaattatcgaccgcggtattccgaaagagcggattgacatgctgaagcactcaggagttgatcttgatcaatggctgaaaagctttgattcagtagaagcgagtgttacagacagcgtaaacgtcattaaacaccatccgctattccctgacaatgtcccggtgcacggtctggtgattgatcctgaaaccggtaaacttgatctggtgatcgacggctaccagcatatggactaatgtttttcttttttgtccggtacgggatcaacaccgcccggatgaaaagggtggcactttaaaatccgcttcagtgtcagccatccgccttttaatgcgccgtgagtcttgacggcttcgattccgtactgcgaacacgtcggataaaagcggcatgacggcggcgtcagcggagagatgaacttctggtatccgcggattaaagcaatcattatggttttcatcaaaaaaccacctttctgatgctagtatagaaaaaaaatttcagattgaaaagcttccgccacaattcttatcggaaaactgtgttataatggatgcatattctgaaaaaaagggagtgccattatgccttcagtagaaagttttgagcttgaccataatgcggttgtggctccgtatgtaagacattgcggagtgcataaagtcggaacagacggcgtcgtgaataagtttgacattcgcttctgccagccgaacaaacaggcgatgaagccggatacgattcatacgcttgagcacttgcttgcgtttacgattcgcacacattctgagaaatacgatcacttcgacatcatagatatctcaccgatgggctgccagacaggctattatcttgttgtcagcggcgagccgacagcggaagaaattgtagacctgcttgacgctacgctgaaagaagccatcgatattacggagattccggcggccaacgaaaaacagtgcggccaggcgaaacttcatgatttagaaggcgcgaaacgcctgatgcgtttctggctgtcacaagataaagaagatttgctgaaagtgttcggataaaaaacaggcctttttgctgacatgcaaaaaggcttttttacatatttctaaaaaatgtcacaccttatgtgtaagcgtttgctaaaatagaagcaaacataaaggagtgatgggatgaaacgggctgtattggcaggtatgtgcggtatggtatttctattatcttcctgcgggggcaattcggacaaaacctccacggatgaagagcctaaagcgcttgaggtcaagcttacaggaccggaaacgactgcaccgcatgaaaaagcggaatacaaggcggaagttttttacggcggcaagcgtgtcacggatgcggatgaagtcatgtttgaagtatggaaagaaggaaaaaaaggcagcagcaaaacaagcaaggccaaggaggaaaaaggggcgtatcacctgcggactgaatttgatgaagagggtgtgtataccgttcaatcccacgtaacggcaaaacagcagcataatatgccgactgtaaaagtgcgtgtcggggatgctgaagctgccgatgattcctccggccatgaggaacagacgcatcatcattaaggattttttttatccgtcaagccttttgatgcgtcctccggcgggtcaatcgtatgttttacattataagctcttacagtcgaccagatggataaaagcagcacggcgagcacgataagaaagccgaagctcagaagaagcagcatgaaatccctcctttttaacaaatcataacatattttccatccgtaaaatcaagggctaaaaatttatgttttaacacacgatatatagggtatatcaatagtaaaccaaaggaggaagataggcatgtcagaaaaactattggatgcagtcaataagcaagttgcaaactggacggtcatgtatgtgaaattacataattatcattggtacgtcaaagggaaggactttttcacattgcatgaaaagttcgaggagctgtataacgaaacggctacatatattgatgatctggcagaacgtctgctggcattaaacggcaagccgatcggcacaatgacggaatcattgaagacagcgtctgtaaaagaagcggaaggcaatgagagcgcagaacaaatggtacagaacatttatgatgatttcactgtcattgcggaagagctgaaaagcggcatggatctcgcagatgaggtaggagacgaaacgaccggtgatatgctgcttgccattcaccagaatatcgaaaaacataactggatgctgaaagcgtatttgggataatcaacaagggaagaccggggctataaagcactcggtcttttatttggctgccgaagagaggtgttgtccatttttctgaaaaatccagtccgttccattcacttttcatagaataatgtaaggccgtttctgtgaaaggatgttggatcaagtgggcaaagactttggcatcttttcgttttttgcagtgatcgtgtcggcagcggggtttttcttcggaggttttcagtattcgtttctgattttgctatcggtcatggcgattgagtttatcagtacaagcttaaaagaatctcttttgcagcagctgagcgcaagaaagctttttgcgcggctggtcaaaaaaatcgtgaccctggcattagtctcagtttgccatttttttgaccagctgcttcataccgaaggcgccatccgtaatttggctatcatgttttatatcttatacgaatcggttcagatcgtgattacggcaagctcgctgggcataccggttccgcaggtgctcgtcgacctattggatactttgaaaaataaattcaagcgcaaaccgtaacatttgcttcaaaggaggctatactagcgggtatgatggttttcctctgaatttttgataaagggcttccgaacaaacgcaactgtggtatgatgtatggaagatatgaaggaacggattagagggataaacatgtacgagtttaaagactattatcagaacactgttcagctctcctttgaacaccagcctttttcagacagcccgaagcacgtatgggtcatatgccgatatggagataagtggcttttgactgagcacgaagaccgggggtttgaatttccgggcggaaaagtggagccgatggaatgtgcggaggaagcggccctgcgcgaggtgaaagaagaaaccggcgccgcggtaagacatctgaagtacgtcggacagtataaagttctcggcagggaaaaggtaatcgtgaagaatatttattttgccgatattgaaaagcttgaacaacaggctgactattttgaaacaaaggggccggtgctgttcagcgaactgccggagaatctcccccgaaataaaaaattcagtttcattatgaaagattcggtgcttccgatcagtctgaaaaagctgaaagaggacggcgtatttcaatcataaaaaacggagacccggcgtttacgcacgggtcttttttaaatttttcctttcgtccattttctttctaacagttcgactccctgatacatcaatgtcgcaaaaatcgcgatgatcagaaggcttaagaacacaagagtgaaattgaagacctggaatccgtaaatgatcatgtagcccagacctttttcggaaacgagaaactcgccgacgatgacaccgacccaggataaaccgacgttcactttaagcgcggaaataatcgcgggagcgcatgccggcagaatgacttctttaaacatgatgcttcttttcgctccgaaggttttcatcaccttaatatagttttcatccacttcctgaaaagccgtaaagacgacgattgtcgtgataatgacactgatgactgctcccatggcgacaatgcttgtgaaattcggtccgagtgccacgatgagaatcggtccgagtgcgaccttcggcatcgcgtttaaaatgacgaggtacgggtctaaaacccgggcgagcctgtttgaccaccataacaaagcggcgaggcatgtgccgaggagcgtgccgagcaaaaagccgagaacggtttctcctaaggttacgccgatgtgcgccgcaagggatccgtccgcaatcttttcaactaaaagcctgcaaacggcggagggtgagctgaagattaacggatcgatccagcccgccctgctcgatatttcccagccggcaaaaaatacgatgaaaatggcggcctgatacgcacggatccggagcttttctttttggtgtcttttcttaaactgctgatgaagctgttcaatcgtgccgctgctgtttttcaagggaattcagctccttccatatggtttgaaacagcggctgaaaggccggatcctgacgcgcgtcaaacggatctaaagccgcgagctccttaggcacggtgaatatttggtggatggtgcccggctgattcgaaaataaatagatcgtatcgctcatggcgatggcttcaccgatatcgtgggtgacgagcacggcggttttttgaaaatcctttaatgttctgaagacaaggttttccaaagaaagcttcgtttgaaagtccagcgcggaaaacggttcatcaaggagcagcagtcccgggtccggtgcaagagttctggcaagtgccgcccgctgccgcatcccgcctgacagctctttcgggtatttcttttcaacgccgattaatccgagcttaggcagaaggctgagaacttcagctcttttttcttctgttaatgtttttgaaatgtgtaaaccgagcagcacgttttcctcaattgatttccaaggaaataaataatcctgctgaagcatataaccgatttggtgttctttatggttcggcacgcttccttcaatcagcacccggccttgcgcaggggtgataagaccggccagaatggacaggagtgttgtttttccgcatccgctcggtccgagaaaggagatgaaatcccctttttcaatctgaaaatgtatatctttcacggcggttgtcttttctttcagcgagaaataagtatgtgttacatgatccacatgtaaaaaagacattcatgttcctcctattgttctgaggtgacttttttggcgatttttgtgttgacgagtttgctgtacggaatgtgtttcgggagctctccggcttcatccataatagattgaagctgttcccattcatccttttgcagaactgggtctgcagagaatgacttttgttttttatatcgctctattgatgtttcgataatggccggatcggtatcggcaaattccttctgaatcgtttttgcgatgtctttggccggatggctttccacccattgctgggcgcgatagatggcgcgggtgaatttttccgccgtcttttcattggttttcaaataactttcttttgccataaaggttgtgtatggcatttggccggaagcttctccgaaggatgcgacgatatggccgatgccttctttttcaaattgggatgccgtcggttcaaacagctgcacataatcacccgttccggatgcgaatgcgttggaaatattggcgaaatcaatgttttgaacgaggttaatgtcttttttcggctctatgtgattctttttcaggacgtactcaccggccatttggggcatgccgccttttcgctggccgagaaatgtttttccttttaaatcgctccatttgaatgatttctcatccttccgtgacacgagaaatgtgccgtccgtctgcgtcagctgcgcgaagttgatgaccggatcttttgctccctgcgcctccacgtaaatggatgtttcagaaccgaccagcgcgatgtctgacccgtttgacaaaagcgatgtcattgttttgtctccgccccatgttgtttgaagtgacacttggagcccttcttttttaaagaaaccttttgcttcagcgacatacagaggcgtatagaagatggagtgtgtgacttccgccacctttacctttgtcagactttcttcctgtctgcaagccggaagaatgagcaggaaaaaggcgcatatgacaaaaacgcagcccgttttgagccatttgttcacggtgtaacctccttgttttaagcgttaaataaccttttctgctttacatatcgtatgatgggtataaaaaatgtgtgagtgcccatattcacgttgggaaagaataaaaaaactgatgatataaggaggccattgttttgctggcagaaaagaaaaggttcccgtctccgagtccgcatatccgcctctttgaggtatgctatgagtcagaaggactgaaggtaaaggggcttcttgccgagcctgcggcgccgggaacatatgacggttttttatatttgcgcggcggcataaaaaatgtcggcatggtacgccccggaagaatcgttcaattcgcttcccaaggttttgtcgtgtttgcgccctattacagaggtaaccagggcggcgagggaaatgaagattttgcgggagaggacagagaggacgcgttttccgctttccgcctgcttcgggagcatccgaacgtcagagaagggcgggtgcatattttcggtttttcccggggcggaatcatggggcttttgaccgcgattgaaatggggcatcaagcggcttcgctcgtttcatggggcggtgtgagcgatatggtgcttacttatgaagagcggaaggatatgcggcggatgatgaagcgggtgatcggaggcacgccgaaaaaggtgccggatgaatacagatggcgttcgccgtttgaaaacgcagaccgcattcaggcccctgtgctgctcatccatggagagaatgatgagaatgtttcgatcgaacacgcccgaatgatcgaggacaagctgaaagaggcggggaaaccggtggaaacttggtattacagcggttttacgcattattttccgccgcaggaaaacagacgcattgtccggcggctggcggaatggatgaagacacggtaagatgcctgatttatgatatgataataaagaataagagaatgaaaggggattttcattttgggaatgcctgttgaatttaataccatgattgtgacaaaaggcaatgaaaaacggatagaggaaaatatctttttattggagaaagagggctaccgcgtctatcctcttgatattccgatggacgtgcgcaaaacgaaaaccggcgagaaatccggcaccggcgaggtccaaaagctcgaatgggcgaacggccggacaagcattacatacagactcacgtcgctccattcgacaaactgaaaaaacaaaagccaagggcataaacgcccttggcatttttgattacacgagaggtccgccggctttggcaatcgagtccgcatgggaaaactttttaaagttttctttaaactcattggctaaaaacagcgctttttcgttgtatgcttgtttatcgctccatgtgttttcaggctgaagaacttcatccggcacgcccggaacatgaacgggactgcgcaggccgaaaatgctgtctgccgtcatgtcagtctggttcagtctgccttcaatagcggccttgaccatcgctcttgtatacgaaagtttcatccgttctccgactccgtaccctccgccggtccagcctgtgttgaccaggaagacttgaacgccgtgttcgtcgattttatgcccgagcatttcggcatatacatgcgccggaagcggaaggaacggtgaaccgaagcacgtcgagaaagtcgtttgcggagatgtcacgccgcgctcggttcccgcgagtttactggtgtacccgcttaagaagtgatacatcgcctgttccttcgtcagtttgctgatcggaggaagcacgccgaatgcgtccgccgttaaaaagacgatcgcctgcggatggccggcaatgctcggctgcacgatattgccgatcatctcaatcggatatgcggctcttgtgttttccgtgtagaaggaattgtcgtaatccgcttcacccgttttttcatcaagcacgacattctcaagaacagacccgaagcggatcgcacgaaaaatctgcggttctttttcctcgctcagattgatacatttagcgtaacatccgccttcaatgttgaaaacgccggaatctgaccagccgtgctcgtcatcgccgatcagtttgcggtccgcatcggctgaaagcgtcgttttccctgtgccggaaaggccgaaaaacagggcgacatcgcctttttcaccgacattggctgagcagtgcatcggcagtatatcctgctgcggaagcaggaagttcataatggagaatattgattttttcatttctccggcgtattcggtgccgccgattaaaatgacgcgcttttcgaaagagacaatgataaatgtttccgaatgcgtgccgtccgtctccggatctgctttaaaatgcggagctgagagaatggtgaaaggctgcgcttgcgtgtctctttcatccgtctccggtctgataaacagctggcgcgcgaataaattgtgccacgcaaattcatttacgaccgtaatcgggagtctgtatttttcatccgctcccgcgaatccttcaaaaacaaacagttcatcccgctgttttaagtagctgacgactttggcgtacagcttttcaaacgcctcttcagaaatgggctgattcaccgcgccccaatcaatttgattttctgtgctttgttcacggacgataaatttatctttaggtgaccggcctgtatatgcgccggtggtggcacgtacggcgcccgttgatgtcagcgttccttcatttcggctgatcactttttcggtaagttttgaagccgataaattatgatgcacattcggacttgcaagtaatgcttgaagatctgcggttaaatcaactaatttcataaaaaccttcctttgccggtttatttgtatttcgctgaatgtggaattagtataacatatatctgaaaatagtctatactatttgtggttttttgtttgtgtttttccattgcttcccgaaataaaggcgcgtaatcgctttaattcatattgacactttccgcccttttacgataagatatttcattgagcggatactcttatcccgagctggcggagggacaggcccgatgaagcccagcaaccggtttctctgtaaaaaagcaggtgaaaacactgtgggaaaccaaggtgctaacctgatgcaaggtttaatattttccttgagcgataagagtgaaaggcacacagaccaaaccctttcctcgagtggaaaaggtttttttatttcataaaatatgccaattaacattctctgatatagtatgacattgtattaagagggagcgagttccgtatcatatgaaaaggtcttgcaaaagatcttttttcaggaggaaaagtgaatgagtaaaaaccgtcgactatttacatctgaatctgttactgagggtcatccggacaaaatctgtgaccaaatttctgacagtatcttagatgagattttaaaaaatgacccgaacgcgcgcgtggcctgcgaaacatctgtaacgacaggacttgtgctggtaagcggagagattactacatcaacatacgttgacattccgaaaacagtccgtgaaacgattaaagaaatcggctacacacgcgccaaatatggatttgatgcggagacttgcgctgttttaacatcaattgatgaacagtctgcggatatcgccatgggtgtcgatcaggctcttgaagcgcgtgaaggcacaatgagcgatgctgaaatcgaagcaatcggagcgggagaccaaggcctgatgttcggttatgcgtgtaacgaaacgaaagagcttatgccgcttccgatctctttggcgcataaattagcccgccgtttgagcgaagtccgcaaagaagacattcttccgtaccttcgccctgacggcaaaacgcaagttaccgttgaatatgatgaaaacaacaagccggtccgcatcgacgcgatcgtcatttcaactcagcaccacccggaaattacgcttgagcagattcagcgcaatctgaaagagcatgtcattaatcctgtcgtgcctgaggaactgatcgatgaagagacaaaatacttcatcaatcctacgggacgtttcgtaatcggcggacctcaaggtgatgcgggtctgaccggccgtaaaatcatcgttgacacatacggcggatatgcacgccacggcggcggcgcattctccggtaaggatgcgacgaaggtagaccgttctgcggcatacgctgcgagatacgtagcgaaaaacatcgtggcagcaggtcttgctgattcttgtgaagtgcagcttgcatacgcaatcggcgtggcacagcctgtttctatttccatcaatacatttgatacaggaaaagcttctgaagaaaaactgatcgaagtcgtacggaataacttcgacctgagacctgccggcattattaaaatgcttgatctgcgccgcccgatctataagcagacagctgcttacggccacttcggacgtcatgatgtggatcttccttgggagcgtactgacaaggcggatgcgcttcgcaaagaagcactaggagaataattttatagccgcttacttaagcggctttccctttttgtagatgctgccatgcttattttttacatagcgtgaaaccaatggcgtaacaaagcgtctataaaaagggggtccaattagaaaattacacttatggaggctatactatgtgtggatttgtcggtgtttttaataagcatccattaactcaaaccgcagatcaagaagagctaatcaaacaaatgaaccaaatgatcgttcaccgcggtcctgacagcgatgggtattatcatgacgagcacgtcggattcggcttcagacggctcagtattattgacgtagaaaacggcggacagcctttatcatatgaagacgaaaaatattggatcatttttaacggcgaaatctataactacattgaattgagagaagagcttgaagcgaaaggctacactttcaatacagattccgataccgaagtgctccttgcgacataccgtcattataaagaagaagctgcttcaaagcttcgcggaatgtttgcgtttttaatctggaacaaagctgaccgcgtcatgtacggcgcgagagacccgttcggcattaaaccgctgtattacacaaccatcggggataaagtatattttgcatctgaaagaaaaagtttaatggccgctcaaaacggcattgatcttgatacagcttctttacagcaatatatgtctttccaattcgttcctgaaccgagcacgcttgacgctgaagtgaaaaaagttgagccgggcagccagtttacgatccgcccggaaggcgacatcgcgtttaaaacatatttcaaagcgaactttaagcctgttcagtctgatgaagataaattggtgaaagaagtcagagacgcaatctttgactctgtcaaagttcacatgagaagtgacgttcctgtcggttcgtttctatccggcggtatcgactcttcttttatcgtctcagttgcgaaagaatttcacccgagcctcaaaacattttccgtcggttttgagcagcagggcttcagtgaggttgacgtagcgaaggaaacggctgccgcgctcgggattgaaaacatcagcaaagtcatttctcctgaggagtatatgaacgagcttccgaaaatcgtctggcactttgatgacccgcttgcagatccggcggcgattcctttgtactttgtcgcgaaagaagcgaaaaaacatgtaacggtcgcgttatccggggaaggcgcggacgagctgttcggcgggtacaatatttaccgcgaaccgctttcgcttaaaccgtttgaacgcattccgtccggtctgaaaaaaatgcttcttcatgtggcgtccgtcatgcctgaaggaatgagagggaaaagcctcttagtccgcggctgcacaccgcttgaggagcgttatatcggtaatgcgaagatttttgaagagcccgtgaaaaaacagctgctcaaacattacaatccagagctttcataccgtgatgtcacgaagccgtactttacggaaagccgttcatacagcgacattaataaaatgcagtatgttgacatccatacgtggatgcgcggcgacatcctgttaaaggctgacaaaatgacgatggccaactctttggaactgcgcgtgccgttccttgataaagtcgtgtttgacgtggcttctaaaattccggatgaactgaaaacgaaaaacggcacgacgaaataccttctgcgcaaagctgctgaaggggtagtgcctgatcatgtgcttaaccgcaaaaagctcggcttccctgtgccgatccgccactggctgaaaaatgaaatgaacgaatgggttcgcaacatcattcgtgaaagtgaaacagatgcttatattgaaaaggattatgtccttcagcttctggaagatcattgtgccgacagagcggacaacagccgcaaaatctggaccgtcctgatcttcatgatctggcacagtatcaatgttgaaaaaagactggtgccggaagagctgaatcatcagccgaaagaagtcattttcgtttaatccaaaaggctttcgatgttatcgaaagccttttttctattgttttttgtaaaccgtctattccgctctgttttcgacaaagtattacgcaatattcagaaaaaggttataataggactaatcgggtagattccggaaagtgttttctggctatttcgtctcggtttgttgtttctttgtcaaaatcagggggagggagagttatgcaaaacaaagaaaaaacgcttcaccgcggcttggaagagcggcatatctcgcttatgtcgttgggcgccgcgataggagtcgggctgtttctcgggtcggcttctgccataaagcttgccggaccggggattttagccgcttacgcctgcagcgggctgattatgttttttattatgcgggcattaggggaaatggcgattcaaaagcctgtagccggctcattcagccggtatgccagagattatctcggtccgcttgccgggtttttaacaggctggaattattggtttttatgggttgttacctgcatggcggaaatcaccgcggtcggcatttatatgggctactggttccctgacgtgccgtcatggatatgggcgctttgtgcactcgtcattatgacggctgtcaactttctggcggtcaaagcgtacggtgagcttgaattctggtttgcgctcattaaagtcttggcgattctgtcaatgatcgcgatcggtctggtgatgatcgtattcggtctcggaaacggaggcgttgcgctcggaatcagcaatttatggagccacggcggctttttcccgaatgggattaaaggggtgctgctgtcgcttcaaatggtcatgtttgcctatctcgggattgagctgatcggtgtcacagccggtgaggtcaaaaatccggaaaaatcactggcgcgggccatagatactgttttttggcgcattctcattttttacgtcggagctttgtttgtcattatgtcaatttatccgtggcaggaaatcggttcaggcggaagcccgtttgttttgacatttgaaaaaatcggaataccggctgcagccggaatcattaattttgtcgtattgacggcggccctttcttcctgcaacagcgggatcttcagcacggggcgcatgctgtttaatctggcggagcaaaatgaagcgcctaaagcatacggtacggtcacaaaaggcggtgtgccgggaaaagcggtattggtttcagcgggcgcgttatgcatcggcgttctgctgaactacgtggtgccggcgaaagtgtttacgtgggtgacgagcattgcgacgttcggagcgatttggacatggtcgattattttgctttcccaaatgaaataccggaaaagcttacagccggaacaacggaaaaaactgaaatataaaatgcctttataccccttttcctcatatatctcgctggcatttctcgcttttgtcgttgtgctgatggcttttaatgcagagacccgggtggccgtcatcatcgggcctgtctggttcggcatattattagccgcctattacgggaaaggtttccataaaagaaaagacataggtctagaaaacggacagacattcgccgaaaaagcgtaaaaaaagagcccgggacatgggctctttttttcataggatcgggccggcgggggaagaataaaacaaattcctgaacattttgcttctgtttcctgacaatcgggagaatgcaaatggtttttacttaaataatattttgaaaaatggtacagtagtaaaacaaagctgatctatttttatttctcttgcagtgttttatagtatcggcctttttcaacatattccgttctgattctttccatgtcccgtatgtcttcttctgtcagccggcggataacctttgcgggccggccgaacgcaagacagccgggaggaatggttttgcccggaggaacgagacttccggcgccgataaacgcgccttctccgatttccgccccgtcaagaatgacggagcccataccgattaaagcattctttttgatgattgcgctgtgcagtgtaacctgatggccgatcgtgacgtcatcttcaataagaagcgggcggttcggactttgatgcagacagctcaagtcttgtatgctgactctttttccgatccttgtcggcgcgacatccccccggatgacggctgagaaccaaatgcttgattgttctccgatcacgacgtcgcccgtaatgacggcgttatccgcaatgaacgcttcaggatgtatgtcaggcgtaaattgtttataagggtagattatcatgtctcatccttctttctctaaatttatgtaagaggtgaactgcatgtggacttggaaagcagacaggcccgtcggtaccattgtcattatccacggggcaagcgaataccacggacgttataaatggctcgttgaaatgtggagatcttccggatataacgtggtgatgggcgatttgcccggtcagggaacgtcgacccgcgccagagggcatattcgctctttccaagaatacattgatgaagtagatatatggattgataaagcgagaacgcttgaagcgcccgttttccttttgggccacagcatgggcggactgattgcgatagaatggtttaagcagcagagaaatccccgcattacggcactcattttatcatcaccttgtctgggtctgcaaataaaagtcaataaagtccttgattttgcgtctaaaggactgaacgtcctcgctccgtccctcagagtggattccggtttatcacctgatatggcaacgaggaatgcggatatgattgaagcggatcaaaacgattctttatatgtcacgaaggtatccgtaagatggtacagagagcttttaaaaaccattgatgccgctatggtgccgactgatgcgtttttaaaggtgccgcttttgcttatgcagggcggtgatgacaaaatcgtcgataaaatgaaggtccgcaaatggttttccggtgtggcttcccataataaatcgtaccgggaatgggaagggctctatcatgaaatttttaatgaaccggaaagagaaactgtgtttaaggcggcaaaagcctttacagatcagtatatttgaattcgctgggggtgcatatgttgacagtaccggaacatccttttaaccttatggcaaaagtgtatcgggaaatttttccgctcgttcatcaggaattgaacatgtggcgggaaaaatcagattccattaaaaataccgaactgcggcagcaggcggccgcaagtatccgcgataagtcgtttcattgtgaaggcggcggcattttagccctgctttcgggagaacagaaacaaaaatgcgtgcaatttatcatcgcgtatcagacaatcagtgattatctggacaatctgtgcgaccgcagcacctcgcttgatcccgaggacttccgcatgcttcatctctccatgcgtgacgcgctgacggtcggtgccgaggtgcggccgtactatcagtacagagacgagcgggatgacggcggttatcttcatgagctggtcagaacatgccagcgggtgctcgggtcaatagaacattacggtatcattaaaccttatttgcttgagttgtgtgattattattgcgatcttcaggttcataagcatgtcgttgagcatgaacgcgttccgaggcttaaaggctggtttgagcagtaccggtcacagcttccggaaatggagtggtttgagttctcggcctgcgccggatcgacgttaggcattttctgtctcgttgcttactcattccagcctgattttaacgaacataccgctgagaaaatccgcagcagttattttccgtacatacaagggctgcatatactgcttgattatttaattgaccaggaagaggatctgcttgaaggcgatctgaatttctgtacgtattatcagtctcatgaagaaatgatgcagagactgcagcattttattgaaaaagcggatgaacatttgcaaggcattccgcatgaaaattttcaccggctgatcaacagagggctgctcggcgtctatttatccgatgacaaagtcgccggccaaaaagaaatgggccgcctcgcgcgaaagctgatcagggctagcggaaaaacgtcatttttcttttatatcaacggaagagcctaccgcaaatttcagaagatggcttggacgaaaagttcgtaatgggtgaactgcgcctctcgtgtaaatcatgacggcgcagttttttatttatgacgtgaagtatgaaatgaaacattgtttgcgcctgcagaatatgatactttaattttatgaaaaaattaaagtatttagcggtcatagcattactttccatttccggaggctgctctgtcatccatgcttccgccggctatcatcctgtcttgatagcgcacaggggctcttctgcgattgagccggaacatacagctttgtcttatgcgcgtgccattaaagacaaagcagattatattgagatagacttacgggagacaaaggacggccatctgattgcaattcacgataaaacggtagatcggacaacagatggtaaagggatgacagatgatctgtctttggctcagattaagaaactgaatgcgggaaaaggagaaaagattttaacattagaagaaatcatacagaaattcggacaaactgccaattactatattgaaacaagagaaagcaacggcagcctggtgatggaaaagaaactgattgacatattacaaaaacataagctgatttccagccataaagcagtcattgagtcttttagcgggaagagcttaaagaaagttcgatctatggataaaaaagttcctcttgtccgattattaaaagataacgaggctgaggagataaatgataagcagctgcaaaccatcagaacgtatgctgatacagtcgggctcaacgccaaattggcaaatgaagcagtcgtgaagcgtattcatcacaataagatgaaagtgcacgtgttttttgataaggaagacgagcatacgctgacgcctattatgctgaaacaaaaagcagatggtgtctttacgaacaatcccgcttatacacgcggcgtgctgcaaaacagtaaataaaaagagacatgcgcattttacgctgtctctttttttaacggtttcttttttgccgcaaggtgcattgcgaatttgccgatcagcccgatgacaaaaaatgcagcaaaccaccagtaataggtttttgcgaactcaaatcctaaatgtcttgataaaatgatgacgaacatcacatagggaacacttgaaaatatgatgcgaagaatattcaaactgccgctcctcccagatgttacacttaaaagatgaacttttttccattgtttcatagtaattgacttttcaggaaaagtaaacacaaaaagaatcggcccgcttatgacaggccgattctttatttgccggcagatttcttttcaatcgctataataaacggcgggtcgtttcgctggttgaaaaagccgtagctcagcacgcgcgctttttcctgatcaagattgctgcagtactccagtaatgcacttttttccgtcttgccttcaggatgcccgtggtacacaacgagaacgatcagcccgttctccttcagcagttcaaggagctgttcgatcgcggaaatggttgagtggccgtttgtcgtaatgcttttatcgccgccgggcagataaccgagattaaacacggcgcaagccacacgaccgtgcgcatcctcaggcagcgatgcctttatttgatcatggctcttatggtgaagcgtgacgcgcgggccgaagtcggcaccgagccgctccttcgttttagcgagtgcgtccgcttgaatatcaaaggcatggacatgtcctgtctcaccgacaaggccggccaggaaatatgtatcatgtccgttgcccatcgtcgcgtcaaccgtgatatcaccttcctgtgcggcggacttcagcaattctttactgaaagggaggatgtgcatcaaggtcatagggcggtctcctccccgatctttctgaagagctttccttgatagcttccccgtgtttccagctctttttgaatggcgcccagtacttcccacttattgacgctccacatcggtccgaccattaattcgatcggcccgtctcccgtaatgcggtgaacgatcatatccgggggaatgatttcgagctgatcacatacaagacttacatattcttcttgagaaaggaactccagctttcctttttcatattgcttcaccatcggtgtgccttttaataagtgaagcaggtgaattttaatgccttgcacatccaaatcagcgacggctttggccgtctccatcatcatgtccctgttttcaagcggaagcccgttaatgatatgggaacaaacgcggatgccgtgttttctcagtttattgacaccctcaacatagcagtcaaaatcatgggcgcggttgatcagaagggcggtccgctcatgcacggtctgcagcccgagttcaacccacaaataggtccgctcattcagttcggccaaatattccacgacatcgtccggcaggcagtccggacgggtcgcgatcgacatgccgacaacgccgtcaagcttgaggacggattcgaatttttctcgcagctcctctaccggggcatgcgtattcgtgaacgcttggaaatatgcgatatatttgccgtctttccacttttcgtgcatgcggtttttgatatcgtgaaattgcgtgagtaagtcatcggcccgattgccggcaaaatcgccggagcccgccgcgctgcagaatgtgcagcctccgtgtgcaaccgtgccgtcccgattcgggcagtcaaaaccgccgtcaagcgcgactttaaacactttatgcccgaaatgctcccgcagatgataatttaatgtatggtaccgtttttccgtatttgaataaggaaaagggttattctcgttcaatgtttaaaaagcctccctcacatcagatgcatcctaaaattgtagcatgaatgatggagcggaacaatgaaacaattatggaacggtcaagacgtaatatctacctggtttttctgttgttgttttaaacgttttggagaaatatcactgaacaatgcaaaaataattcctaaaataagaattacactgcctactttgaatgtattattaaaactgtcacttattttttcattatataaatttgaaatttttttctggatagccataacttccttcttttgaatattgaagcttttttgcactttttctttatacggatccggggttatagagagaatttcttcctcttttttgtttaattcagcaatacttttgcttcgatcgaaacctttactgtctgaatgctttaagtgagttattatctcgttctttgcatttttatcaaaaacctgattgctttccacaattttaatggcttcttttttcgcagtagctgtgtgatcatttatattcattgtaagcacagatgtaagtatggcaatgcctagcgcttgtccaactgtccgcatcatattaagaatacctgaggcaattcctactttctcaggaggaataagccgtatccctgaactcattgctggtcctatcacaagccctaaagctaagccggtcaaacataacagaataattactggtgttatagaactgtcgtatcgtatgtatccatataaatatgttgtgattgttaaaccgagcatacctagacccgaaagccaaatgcccccgagtttatcagatagctttccagaaagtacagaggtaaacatagatgatagagctaatgtagaaacaattaaccccgcttctaattcagtttttcccattaaattagtgagaagtaaagtaataataagggtaccgcttgttaatccaaggccctgcataaagagggtgaaagaactgaaactaaacgtacgtatcttcagcatggataagggaatcatcgggtttttaattttagattcaataaagaaaaacaaacagaataataatacagagattacaaaaagagagataattaatggtgatgaccagcctaagtcagatacttttgcaaaaccaaaggttaaacagaagagagctccggataaaataagaatccccatgtaatcaatttttttactcactgtttcatcataactctcagtaataaaaaatgctgctaaaaaaagagaaatcagacctaaaggaatatttatgaagaagatagcttgccaattaaaattttcagttaataatcctccaagtacaggtcctaatgtagctgctaatcctgagaaagcaccccagattccaatgatcattccttttttattttgaggtacgatagctaaagctataggcattgtaacaggtacaatgaaagtagcagataatccctgaatcactctaattgtgacaagcatttcaattgaagtgctcaaacatgcaataactgatgtcaaaataaaaagtgctaatccaaacataaaagctttttttcttccaaaatggtctgccagctttgatgcacctactaataaaaccgcaaaagctaaagtataacctgtagccacccatgctacttgagaaaggttactcgaaaaataatccagcatcttaggtaaggcgatatttactatagtggtgtccattactgaaatgaatgtacctaataataatgcagatagcataattaatttttgaaaattcaatactacaacctccattagatattaatctaaatttaaattcgatatatatctaaaaacatgataaatgtaatcttaagaggtgtcaatattattcataaattgttttttcatccacttttctcgaaatcatatttttataattcaacaattttgtaacttgaaataactcaataagagctaaaattgacctgtaaactagctgagatgatgaaggatttctgaagagtgtgacatgaggagaacactcagcaagaggtgaggcaagtctaataaatctaggactgctcatgataatgctcagtcaggtatgtgcttaaaggaaaattctttaaaattagaaatgattattctttgaaagttcccttttaattgataatattaaaaatgtaaaatgtctggcatgaagatagtacaacgttttccttgtggaaaaagactttaggggatgtgaaaaagtgcggttaataattaataacagtgtttcagaattctttgacaagatatcctctattctattcttgaaacacgaggaatttttcaaagattatacaaccaaattggggttaaatttagataatgaatattttgtattactagatgatcttaaaagaataaaagagttagatagtgagtttttaaatttttattttggcagcttttgcgactacaaagatgttaggaatgcaaatattttttgtttagccacaaccttttttaaaataccacaaatttatacgaaagatttttttgaaattattgattatttgtctgcagttacagaagaagagataagaaaaaatattttagagtctctaatttatttacaaggagatcttaaaaccgaaacatctacccaacagtatttaaatgacagggaaagtttatttgagctacttaataatcttaatataaagcccgaatacaagtggattatatttaaggtaatgaaatctcctaaaaattatgtagatcaattttgcagcaaattaatgtcggtgaatggttatcttaacgaggcgatttataatttaattaaatttagagatgagtggatgaatcaagtaaaaaacataaatatggattttccaaaaaagataatcagtacgttaaaaggtaaggaatacttatcttgtgattatattaatatatatccaacgcttttaccttacactgcaactattacgaaaagtgaagataacatttatgttggacttggttataaagttgataaaatttttgaaaatacattagagaaagctgagattaatcacatcattgattttttgaagcttttatcggataaaagtaagttcaagatattaatcttacttagtcataaaaaaatgtatgctaatgagattgctgaacagctaaatttaaccaacgcaacgatttcacaccatatgagaattttgacgttgcaaggtttagttgagagtacgagaaatcaaaataaaacatactattatcttaattcttcaaaattcgattctcttttgaacggtttgttgaaaaaatttaaagctgttccaggcttagacggggatgagtaaaaaaggttttggttttatagttggtgttagtttcgggatgataattaaagctaataaaaacagatcgtctaatgaattggataccctaaaaaatatgatgaatcctgggtgttttacacaaaaaagataatttgatggtgaacaatttaaagcgaaccgaaaatcttgtgagtgatgtgggaaaattttaatgtttttaataaaagaagaattaagttatcgttctaaaatgaaggatttttataaagagttaattctgtcttgattaagttttacatttaatcgtattttataccgtttctgtcttgtgtatgaattacctgatatttcttgtgagaatttatttggaataagaaatactattgatatgacattatcaataggaggactgtttaatggcaacaagacaatcagtagatgaacatctccaaagaagcgaacaggcgtatgaatttgcgaatgagcaatttataaccgcttcaaaacaagagcattataatgataatgagtacagtgaagcgcaaatgatgcttgaaaacgcggtgaatgaattaaacaagctgtcattatctgcgaatgatcagcaaagagagcagctttaccgaatgagattgcagctgcagaccttgcaaaacaatatgattttgcagcgtaattttgattactgaccgcgccgtttcaaatggttcagcaaacctgccggaatcccggcgggtttttttgtatttttttaaaaaaagaattgacaatagggcggagtgtgtttattgtattacgtgtactacttgatgtaatacacataaaacactcaaaaaatgaaatcgacatataaatgttaagcatagggaaggggaactttcatgaaaaacaaaagatccgtaaaacaagatgtgcctcttattatcgccgcctcggttttggcaagcagtctgtttgtcgttcttgtcgtcatcggttttcaatggcagaacatttaaagaaagagagcagctcgtaaaagaaagaagggaagtaaatgattcaaatcgatccgagaagctcaactccgatttatgagcagattatacagcaactgaaagagctttgtttaaaagggatcatgaagccgggggataaacttccttctgtcagggaattggcaacgatcattatcgccaatccgaacacagtcagcaaagcgtacaaggagctcgaacgcgatggtgtcattgaaacgctgaggggaagaggaacgtatatatcggagaatgcaaaaacgacattggttgaagggaagatgacgatgataaaagagcaattgaaacagctcatcatcgatgcccattacgcgggagttgagctggagaagctgcaggaatggataaaggaaatcagcgctgatgtgaaaggaggcaaggatcatgattgaattgcggaatctctcaaaaacgatagacggtaaagaagtgctcaaggatatttcgctcaccatcggaaaaggggaaattttcgggctgctcgggcgaaacggatcagggaaaacaacactgctccggctcattcagcagattctgctgccggatcaagggacggttttatttaatcaggtggaaataaagcggcatccgaaagtcaaacagaacatcatttatatgcctgttgaaaatcctttttatgacaagtatacatataaacagcttgttgcgattgtaagcagaatctatccgaattttgatgtgacttacgccaatgagctgatgaacaggtacggtattccggaaacgaagaaataccgtgaattatcgacaggcctgaaaaaacagcttgcgctcgtccttgcctttgcttcacgcccggctcttatccttttggatgaaccgacggacggaattgacgccgtaacgcgtcatgacgtgctgcagcttatggtggatgaagtggctgaacgggaaacgagcattctgattacctcacaccgtttagaagatattgagcgaatgtgcaaccggatcgggtttttggaaggaaatcagctgacgaatgtgatggacttggatgatatgaaggaagagtacatgaaaatccaaatggcatttgaagaggacgtcgccttgaagatcagagaacaaaacataccgattctcgaccatgccggtgtgttttatacggtgctgattcaaaagaacgatgagaagaaaaagaactttctgcaagagctgcagccgaaagtatggaacgaacttcctgtgaacttagaagaagtcttcatcgcgaagtttggagggaaccggagatggtagacaggggattgctgtacaaggaatgggtgcagaatcgaactgttcttgtgatggtcggcatttttttagcggcggtcaatccatttgaagtgttaaatacctatctggtttatcaaggctgtctggacaccccggaagcatattgtaacttttatgtgaattctctggagagcggaatgctgaacttgaactgggcgcccgctgtcatcttagcggtttgcttattcggactggagcgtacgaaaggtacgattgatacgcttttcagtctgccttattcccgcgctcaggtgtttcacactaaattttggctcggggcggcggtcattaccggcgctcaggtgatcggctacgggctggctgaactgctcattcttctgttaaagcctgagcgcgtatatttcttccaccattacagcgtcggagagattattgtgagtgttttggcttttacattggttgcgagcgcgggctgcttaacggggaatacgttcgcccagctgttaacggcgtttgctgtgtcgatagcgccttacctgattattacgttgccgctgtccaatgtagaagtcatcttcggagccggcatgtatgagctgatgccgtcagtcgatgcttatatcaaagtatacaatctttttcaatacttgaatccgatcatgtacattgatacagattgggtatctgccagcaagtatatattaatcatcccggcagtgatgagctttgtattttatgccatcgggtacttttgctatgtcaggcagccggtggaacggaacggccgttttttcctctggagacagcttgaccggcccattcagattgtggtgatcataatcgccgttctcggttttggcctggcggggtactcgacgggacatacgatgacaggatatgtggccggaatgattgtcgggggagcggtcggatttttagtcagttattttgtgatttataaaaaaacaaagcatgtgtaagagaggaggaccggaatgataccgcggggattgttgtacacagaatggaaaaaaaatcagtggttgtttttatgcagcggcattcttttaatggcggcaaacccttttatggtttataacaactactcaacatatcaagaatgtttgaataacccagctcttcaagattgtgaattcgttgtcaattatacgaatgggtcacctctttccttcagctggattgtgagtgtcatcattgccgtcttcttattaggcttggaacggacaaagggaacgatggatgctttgttaagcatgccttacagcagaggccaaatctttcagacgaaattttggctcggcggggcagtcattgttgttcctcaggcgataggctatggagcggcgtcattgctgatatctttgctgaaaccgagccatacgtacgattttgatcatttttcaatcggaatgattgtcatcagttttatggcttacgccttgttaatggcatccggcgcattaacgggacagatattcgcccagctgttaacggcgtttaccgtcacggttctgccctttttactcatcggtctgccggccgcgaatttagaggttgttttcgattttagtgtcggagatcaattttcttttatcagcagttatatcgaatcccgtctttttatatttgtaacccctattggatatgtgtttaacgactggatcagagaaagggatttggttttaatcattccgattgtgatgagccttgtcttttatctgatcggttatgtcagctttctgaaacacccgaatgaacggaacggcagattctttctttggagaaaattggaccgtccggtgcagatcttggtgattgcctttgctgttatgggtttcggcgttttcggatatggggtcacagacacgatgttcggctatttagccggcattatcttcggcgcgattatcgggtttttcatcagttattttacggtttacaggaagtcaaagcatatgtagatctgtttgaaaatgagcagtttggaggaaggcaaggtgccgattagcggtttgctttataaagaatggaagcagcggcagacgctgctgcttcttacagcggggttcttagctattttaggccctttggcaattataaatgagtattttcactataaggattgtttgagtgcgcttcatcaatattcaggttcagtttgtacgttcagcattgattacagcaatcggaatttgattgggctgcatttcattcctccggttatgatagggctttttttgataagaggaggcagggctgaaaggatgtttacactgagtcttccgtattcgagaagccggatatttcatacgaagtttttcttgggagcagccgtgttagccggctcgcagtttgtttcttacggagtatctgacatattgtttctagcgcttaaacctgacgctgtccatcattttcaatcattcagcgcagggatgctggtcatcagcttgatgatttatgcattagtgacagctgccggcacgataacgggcaatttagcggcgcagctgatcacagcgttcacggtttccgtctttccgatcgtggttatgacgatttacctgttaaacgctgagttcctttttggcaggcaggctgtgccggatattgatttcccttggagcggatttctgatctatttcatgcctgccgcttacatccatacatcatggatgtattacatgaaacacgcattgttaatctccgcattaatgggattttgtttctatctattcggctatgtgaatttcctgaaaatgccgagtgaacgaagcggacattttatcctaagcaaacacattgaacgtatccttcaagtgctcgtcatgtcgctcagcatgctgggaagtgcgggggtatgcggatatgcttataacgcttcgtataccggttacatattcggcatgcttatcggcgcggttatcgggtttttcatcaatttttacttcatctataaaaaaacgaaacagatataagggggagtggtgtacgtgatagaagtacagcatattgatcattcatttaaaatcggcaggaaaggcagagagagtgaggttccagtgctgaaggatgtctctttgaccgttgaaaaaggggagatcgcctgtatcgtcgggcggagcggttccggaaaatcaacgcttctgaatttaatatccggatacatagcgccgacgaagggccgtatcgtcattaacggcactgatgtgacgggcttcagtgaaaaagagtgggcgcagttccgcctcgggcatttcggctttatttttcaaagctttcagctcattccgagtctgacaacctatgaaaatgttgaaatgccgcttgccttaaaaggcgtcaaaccgtctgaacgcaagcagaaagtcgcggacatgctgaaacgggtcggacttgagaatcatgcgaatcattatccgaatgagctgtcaggcggccagcagcagcgtgtcagtatcgcaagagccctgattttaaatccgtcaattattttagctgatgagccgacgggaagccttgattcagaaacggaacttgaggtgcttgcattaattcagcagctgaaccgggagcgcgggattacatttgtcatcattacgcatgacgatgaagtcgcttcgatcgcgcattcaaaattccagctgcatgacggtgtattaaaagggggcgttactgttgagatttaaggatcagattcactttatcagaagaaatatgaagaaaaaccggctgcgtgttttcatgacggtgctggcgacgacaatggcgtgcgcgtttttagtggtgctggcttccgtcggattcggcatccaaaaaacgattacagacattacgatgagccagcagattgttacggaaatcaatgtgctcggccaagagaacggaaaaaccgtgaagaaatcagacttggaaaagtataaaaatgtcaagtctgtcgttgaaagaacacaagtgtatgaaccgaacaaagcgtcattgggaaaccgaacaaatgaagattcagccattgtgctgacaaacatgaacgatgaagtcaaagccaatatggagcttgatcagggaagagtcgcccgtacagagaatgaaatcgtggtcggctatgattttgcgaagaacctattgacgaaaaaagaggctgacgcttacgacaaagagttaaatgatcaccaaggcgacatgtcggaggtgaaaaaaccaaaaggctatacgaaagacctgcttaataaaacgatacagctgagcatctccaaaacaaacaaagacggagacgttgagaaaacgaaaacgtacgactttaaagtagtcggaattacaaaaaaaccgtcccaagattggatggaggatacaaatatttttgtgagtgatcaattcaagaaagacttctcaacattcttggatctgaagaatggaaatgcggaaaaaagcatcaatgtgtatgcggacaaattcgatcatgtcgatcagcttacccatgacctcacgaatgacggcttttatgtcagatctgtcactaccgagctgaagggcgtcaacacctttttccttgtctttaaaatcggcctgatctttgtcggctttatcgccgtcgtgatttctgccatcggtattttcaatacgatgacgatggcggtgacggaacgaacgcaggaaatcgggattatgaaagcaatcggcgcaagcccgtccatcatccgcagaatgttcctgatggaaagcgcctatatcgggatattaggttctgtcatcgggattatcatttcttacggagtgagttttgccgtcaatctggctgtgccggttattttgaaagcggtagggggaaacaccggagccgaagatcttcattataccttctcctatatcccgctcagcctcgttgtgatcgcagttgtcatttgtgcgggggtcgcggtgatttccggtatgaatccggcccgcaaagcgacaaaaaccaacgttctgactgcattaagaagagaactgtaaaggaaaaaagccggctggacatcagccggtttttcctctatctatcagaaaagggcggataccatgtttcacattttgttaatagaagatgataacactttgtttcatgagatgaaagagagattaacgggctggtcatttgcggtgcacggaataaaagatttcagccgggtcatccgggagtttaccgaaatcaagcctgatttggtgatcattgatgtacagctgccgaaatttgacggctttcattggtgcagaatgatacgttcccaatcaaacgtgccgatactctttttgtcctcgcgcgatcatcccgcggatatggtcatgtcgatgcagctcggggcagatgattttattcagaagccttttcactttgatgtgttaatcgcgaaaatacaggcggtgttccgccgtgtgcatcaatacggcacagaaccggcgctgatgaaaagatggtgcggggcggtcattgacacagaaaccaacacggtcagccgtaaaaacggttcggtcgagctgaccaaaaacgaaatgctgatcttaaaactgctggctgagcagaaaaataaaatcgtcagccgggaagaactcatcagaagcctatggaatgatgagcgtttcgtcagtgataatacgctgacggtgaatgtcaaccggctgcggaaaaaactcgatcaattaggcatcgggaaaatgattgaaaccaaggtggggcagggatacatcgcaaaggaagaagacggtctttatgattaaatcatttctgctcgaaagaaagagctggatcgcgatgtttcttttgcagcaggctgtgcttctttttgcggcatatattgatccgtctattccgtttttttcggtgctgtatttcgtttacctgtctcttcttgtgtttcttgtatttctcttgttccgctatcgtaaagagaccgcctattataaaagcttaagagagtgggacgccaatttagacatgtcttatcttaaagcgcctgacagtccgtttgagtctatcgttgaagaaagcattgaagggcagacagagcagttaagaaaaagctcacttcaccttcaggcggcgtcagagcatgaaaaggacgatctgatgtcatggattcacgaggtcaaaacaccgctgacagcgatgcatctcatgatcgagcgccttgatgaacagccgctgaaagcccctttgctgtatgaatggctgcggattcaccatctcctggaccagcagcttcatcagaaacgattgtcctttattgaaaatgatttatcattccagcgaattcagctcagaccgctcgttttcaaagaaattaaaaatctgcaatcatggtgtatacaaaaagggatcgggtttgacattcagcttgattcaccagacgttcacagtgacggaaaatggctttccttcatcatcaggcagctgttaagcaatgccgtcaaatacagtgaggcggatgacattaccgtaaaaagctatgaacaaaacggccgggtgcatgtggatatcgaagaccgcggcatcggcatcgagcccaaagatcttccgcgcatttttgaaaagggatttacctcgacgcgaatgaggcgtgatcacgcgtcaacggggatgggcctgtatttggctcaaaaagccgcggctccgcttcttatccagatcagcgtgcgctctgagccggaaagcggcacggtttttaccttggtgtttccgaaacagaacgatgccgtcagcatgttcagcgtgtgacaaaagtgtcacatgcttttctcttttgttcgcttaatcaaacgaaaaaaacggcttctgtttttaaaataaagataaccaatgtaaaaggagaatcagaacgtgatgattttagaagcaggcaatatccaaaaaagctacggaaacaagctgaataaacaagaggtgctgaaaggaattgatcttcagattcacaaaggggaattcgtcagcattatgggcccgtcgggatcagggaaaacgacccttttgaatgtgctttcctccattgataaagtgagcgcgggcaccattaaactgaatgagacggagattacatccatgaaagaaaagcagcttgccgaattcagaaaacggcatctcggctttatttttcaggattataatttattggacaccctgaccgtgaaagaaaacatactcctgccgttatccattacgaaaatgtctaagaaagaggcggacctgcgatttgccgagacggcagaggagcttgggatctatgatttgcgacataagtatccgagtgaaatttccggcgggcaaaaacagcggacgtctgccgcaagagctgttattcacgagccgggcattatttttgctgatgagccgaccggagcgctcgattcaaaggctgccatggatttactgaataaactcagccgtctgaatcaaaaacgccgcgccaccattgtgatggtgacgcatgatccggttgccgccagctattccggacgtgtggttttcattaaagacggccgtgtgtatacacagctgaataaaggcggccaggacagaccggacttttttcaggatattatgaaaacgcaaagtgtattgggcgggattcaggcatgagtattcatcatttgatcttccagaacctgaaaaagaatatgaaaaactattacctttacgtttttgcgctggtgttcagcgccgccctttatttcgcgtttgtcacgatgcaatacgatccggcgcttgatgaaatgaaaagctccataaaaggagcggcggcaatccgggccgcctctgtactgcttgtggcgatcgtgtcggtatttcttttatacgccaacaccatttttattaaacggcgcggccgggaaatcggcttattccgattaatcggcatgacgaaaatgcacattttccgcatactcagcacagaaaatttcattttgtatttcggatcgatttggatcggtatttttgccggcttttctctctcgaaattatgtatgatgatgctgtttcatacagtcggtgtgaaagcctctgtctcactgtttttttcaagcaaggcgctcgttcagacgttaattgtgttcggggcgatttacgtgctgattatgatgatgaattacttatttattaaacggcaaagcattttgtctttatttaaaaccgcgtcatcgtcagaaagcggcataagacggctttcttgggtgcagatgtcgatcggtgttgtcggtattgcggccattatcgccggctatgccgtgtccgcggatttattcggaggcagttttacgagcatgaatgaactgttttcggccatggtgtttattctcggctcggtcattatcggaacctatctgttttataaaggttcggtcagctttctggcaaatctcatccggaaatcaaaaggcgggtatctgaatgtcagtgaagtgctgtctttgtcatccatcatgttccggatgaagtcaaacgccgtcctgctgacgattattacgactctttcggcgctggcaatcggtttgctgtctttaagctatatctcgtactattccgcggaaaaatcggctgagcaaaatacagccgcggactttgcgtttgataaccaaaaggagactgactcatttaccgctttattgaagaaaaacggaattgaacacaaagtgaaaacaatcaagaccattcaagccggtgtcaatatgaagaacatcataaacggcgacatgaaaagctttcaacaagacccgtccagcttggcgctgccgattataagcgagaaagacgcagaagggacggagctttctgacggagaagccgtgtttaccggatataatgatatgatgaaaagatttctcgacctgaaaacgtcaggttccattgatataaacggcaaaacggataaaataccgctggcgtataagggcttgaagaacgacttccttctgtcatatacatttacaagcggagggctgccgaccgttatcgtcacgcagcaggtatttgaccggatcgagaaagatatcgacccgtccattcagggaaaatcaaatcggtttttcggcattacactcaaacgtgaagaggacatccaaaaagctgatggtctgtttcaggcgcagcactattctgacggcgcgctttcacaatttgaaacggctgacacccaaaagaaaaacatggggctgatcatgtttattgtcggctttttggggttaacctttctgatcacctcaggctgtatcctttattttaaacaaatgggcgagtgtgaggatgagaaggctgattacacgatattgcggaagctcggcttcacaacgggggatctgctgaaaggcatccgccggaagcaggcgtatcatttcgggattccgctcgttctcgggctgttccacagctattttgccgttcagtcaggatggtttttattcggaacggaagtgtggacgccgatgatcatcgtcatggcgctgtatacgctgctgtactccatcttcggcatgctgtcggtgctatactataaaaaggtcattcaatccgcattgtaaaacaagttgaggagcctccgcataagcggaggctttttttgtatgaatagaagaaagcgatttttaaaagaatagacatacgtcattttctcgcgcgggggagccttatgcagaagtattttcaattgaaatctgaaacaggagcctttcatcttttttccaaggaacacattttcacgcttttggtcatcggattgcttggggtgtgcgtgatcatattccggaaacagctcaactacggccggtcgaatcgcgttttccgctatgtactgttcattctccttgccgtgtcgcagatcagctatcatatatggctgctttgtcatcatgcctggtcgctgaaaacagctctgccgctgcagctgagcgacctttccgtctatttggcaatgctgatggtcatgacaaaaagcaaaaaactgttcgccttcctctattttgccggtttgggcagcgccgtacaggcgatggcaacacctgatttaggggcgtattctttccctcattttcggtacatcgtgtttttcgtctcccacggctgtgtttttcttacctgcctattcatggccgcttcagaaaggtacagaccgtcggcgcgcggactgtgggtgtctgtgctgatcgtaaatctgtacggggcgtgtgtcttttttattgatcgtgtgctgaatgcgaattacttatatttaatgaaaaaaccgaagaccgcttcgcttctgaacgttttcggaccttggccgtggtatcttctatcaatggaagcggcggtgatattgagctttttcattctgtatattccgttttggctgctgcggaaaagagcatgaggccggcctgtttttgtgaatccaatcatttgtaattttttcaacattccggcattatttttttcagattctgatgttgaaaaaagacgtccgcggcgatagaatgaatgtgctatgataacgtgttcgatacggagccgcggcttgcggtttccgttttttcatggggttttttatagagagagggggatcggtatgccgcgcgctttgaagatattaatcatcggaatgtttatcaatgtgacgggcgcatcttttttgtggccgctgaatacgatctatattcataatcatttagggaaatcgctgactgttgcgggggttgttctgatgctgaattccggggccagtgtggcggggaatttatgcggcggatttttgtttgataaaatcggcggattcaaatccattatgctgggcattatgatcacattggcaagtcttctcggactcgttctgtttcatcaatggcccgtttatatttggctgctcatcattgtcggcttcggttccggtatcgtgtttccggccagttacgccatggcgggagcggtatggaaagaaggcgggcggagagcttttaatgcgatttatgtagctcagaacgcaggtgtcgccgtgggctcggcactcggcgggatggttgcggcgtactcgtttacgtacgtgtttttagccaatgctatgctgtatgtgctgtttttccttatcgtatttttcgggtttcgaaatatcaaaacccaaaatgcgagccaggtttctgttctggactacgagcctgtcagcagcagaacgaaatttacggcgcttctcatattgagcggcgggtatgttctcgggtggatcgcctattcgcagtggtccacaaccgttgcgtcacatactcaaagcatcggtatgccgctttcattatacagtgtgctctggaccgtaaacggaatattaattgtcgccggacagcctctcatgggagctgttctgaaaaaatggtccggtgcgttaaaaacgcagatggtcatcggcttttgtatttttatcgtctcgttcggcgtgcttctcagcgccaagcaatttccgatgtacctcaccgcaatggtgattttaaccgtcggagaaatgcttgtctggcctgccgtgcctaccattgccaatcagcttgcgcctaaggggaaagaaggattttaccaaggattcgtcaacagtgcggcgacgggcggcagaatgatcgggccgctccttggcggcgtgctggttgatcagtacggaatgagcgtgctgctgttgatcctgatggtgcttcttgttgtcagcatcgcagcgacggtgctgtacgacaaacgcctgaaaaccgttaataaacaaaacgtccaagtgcgatgacgagataaaaaaatcccgctgtttcggcgggatttttttgtttatacgaccggaagcacgttgaccgcgtccttaacgtttaaatacgtctttaatgaagaaaagctggcatcaagctgattcattctcatggcgagggtaggcttgatcccggtgataatcaattccgtgccgattaatttaagcaggtggtgcaatttgaaaatccggtctgcggtctgttcgtttacctcggccagacctgataagtctataattaagtaatcatctttagatgcggttaatatgtccgtcaaagttgtcacaattgaatcaaatcgttcttccgttaagtttcccactaacggcaaggcggagatgccgtttcggatcggaacaatcggtgtagacagcgtcgtgatttctgtgagggaatcctcaaggagcttttcgtattctttctgctctgtaatgtctttttgaaaaccgacaaaatagagcttgtcttcaacataaagaggatcaatgttgagttcattccaaaacggggtgccgtcttttttgacatttttcagccgcaccgtgatcttttctttctgggttaagctctttctgattttcgcgacttgttgacggtcggtttctttgctttgcagaaatctgcagttcttacctaatatctcttcggaagagtagcctgtcatatccataaatccctgatttgtatatatgatgggattgtcctcaagagaggggtctgtaatcaccacgccgatgcgtgcgtgatcaagcgcctttttgataagctccagctgctccagttttccgaatacatttgagtcagccatgtaaaacccccttttggccgtaaagctgcgcgctttttcagccattgtttctcccctttttaaatgaatctacagtaaccgtagcataacatatgttctgattcaagcagccgaagtttgcaatttgtcattcgggcttgtcctcatatacactgaatatataaggggaaggcacatcatcgctaagtaagtgactaggtcattgtcactgggtgaaaaatgaatctaatgcatcaagcttaccgatcatgtgttcacatataatggaagaaacaagctttttactttcctgctcaatcgccggtatgtagatatcgaaaatcatcgtattcgtaagggggctggatggcctgaagtcgctttactaaataagggctttaggaaggtgatgaagatgctgcatcaggtaataattgcttgtgtaattggaggaatcatgggggttctcggtcatgtgaaaaagagaggcaggctggagaaacccagaatgacaaagcggtttatctatctcggttttttggaagatggttttatcggaatggctgcttccatcttacttgtcttatccgctgaccccgattcaggaattcaactcgtcatcttatccataatcgcaggctacggcggagaagctgttctcaggagctttgattttgtcagagaacaaaacagtaattcggccgaagcaaaaccacaccagcaaaaaaatcctccatcaaaataatatccccgctcatgacccgttccgggtacattcccattgtatacaaacctgcttgcacttatgaacagaattctataaaatacaggtaagattacggtagcgataagaacagtgaagaggagcagtaagaagcagattttgcaatcagagagttgacggccggtgcaagtcaatcaagtctgtttccgaactcgcctcagagttgcagcggcaaaaccgctgacgcataactgcgttaaaagtatcaagtgagtgcggctcaaaaccgtgctaacgagggtggtaccgcgggaaataaaaatctctcgtccctttttgggatgagggagtttttttagttttagaataatctgaatataatctttctcatcccgtcaatacttggactacatacgccgtattcaatcagaaggaggtttttacgttgagttttcagcacgaaaaaatagaaaagaaatggcagaattactggttggatcataaaacgttcgccgtcagtgaagagaatgacaagccgaagttttacgcgcttgacatgttcccgtatccttcaggagccggccttcatgtcggacatccggaaggctatacggcaaccgatatcctttcgcgcatgagacgcatgcaaggatacaatgtgcttcatccgatgggatgggacgcgttcgggcttcctgccgagcaatacgcgcttgacacggggaatgatccggctgagttcacaaaacaaaatatagataatttccgccgccagattcaatcgctcggattttcatatgattgggatcgtgaaatcaatacgactgatccggactattacaagtggacgcagtggatcttcaccaagctgtacgaaaaagggctcgcttacgtagacgaagtgccggtcaactggtgcccggcgctcggaacggtgcttgcgaacgaagaggtcattgacggcaaaagcgagcggggcggccatccggttgaacgccgtccgatgagacaatggatgctgaaaatcaccgcttatgcggacaggcttcttgaagatttagaagaccttgactggccagaaagcattaaagacatgcagcgcaactggatcggacgctcggaaggcgcaaacgtgcatttcgcgatcgacggcactgatgacacgtttaccgtgtttacgacaagaccggacacgctgttcggcgcggcttatgccgtactggctcctgagcatgagcttgtggaggccatcacgacgcctgaacaaaaagaagcggtagacgcttatgttaaagaagttcaggcgaaaagtgacctggaacggacggatcttgcgaaaacaaaaacgggcgtcttcacgggcgcatatgccgtaaaccctgcaaatggggaaaagctgccgatctggatagcggattatgtcctcgcctcttacggaacaggcgctgtaatggccgtgccggcgcatgatgaacgtgattttgaattcgcaaaagtgttcagcctgcctgtcaaagaagtcgtaaaaggcggaaatacggaagaagaagcgtacacgggggacggagagcatgtcaattccggctttctgaacggactgaataaagcggaagcgattgaaaaaatgatcgcctggcttgaagaaacgaaaaacggtgagaaaaaagtgacataccgtctgcgtgattggctgttcagccgccagcgctattggggcgagccgattccggttattcattgggaagatggcacgtcaacagccgttccggcggaagagctgccgctgattctgccgaaaaccgatgagatcaaaccgagcggaacaggtgaatcaccgcttgccaacattaaagagtgggtggaagtcactgatcctgtaacgggcaaaaaaggcagaagagaaacgaacacgatgccgcaatgggcgggaagctgctggtatttcctccgctttatcgatccgaaaaatccggatcagctcgcttcacctgagaaactggataaatggctgcccgttgatatttacatcggtggagcggagcatgccgtgcttcaccttctgtacgcgcgtttctggcataaattcctctacgatatcggtgtcgtgccgacgaaagaaccgttccaaaagctgtataaccaaggaatgattctcggggaaaacaatgaaaaaatgagtaaatcccgcggaaacgtcgtcaatccggatgaaattgtggcgtctcacggagcagatacgctccgcctgtacgaaatgtttatggggccgcttgatgcatctatcgcctggtctgaatcaggtcttgacggagcgcgccgcttccttgaccgcgtatggcgtttgtttatcgaggaaaacggcgagctgacgggcaaagtgacagaaggcgcgggcgaaactcttgagcgcgtctatcatgaaacggtcatgaaagtgacagaaaacttcgaagcccttcgttttaacacgggcatttctcagctgatggtcttcattaatgaagcttacaaagcgaatgaactgccgagagaatatatcgaaggttttgtgaagctgctttctcctattgcgccgcatttggcggaagaactgtgggaaaaactcggccacgaaggttcgattgcatacgaggcttggcctgcttatgacgaatcaaaactggtggacgatgaagtggaaatcgtcgtccagctgaacggaaaagtaaaagcgaaattaatggttccggctgatgctgataaagcagcgttggaacagctcgcacaagctgacgaaaaagtaaaagagcagcttgaaggaaaaacgatccgaaaaatcattgccgtaccgggcaagcttgtcaatatcgtggcaaactgaccgggcgaagcccctctcctacagagaggggcttttttatcagcctctatcatagaaattgcaccgcgggctttggtatacttaacaccataaagatgaatgggagtgtcacacattgaaaataaatgaaatcagcacagccgtactggaagaaaaattaaaagcgggagaagagctgtatctgattgatgtcagagaagacgaagaagttgccgaaggaatgattccggaggccgttcacatccgcatgggggacatccctgagaagatggatgcgttagacaaggacaaggaatatgtatttatctgccgttccggaaaaagaagcatgaacgtttgtatgtatttacatgagcagggcttccgtacggttaatgttgaaggcggcatgctggagtgggaaggcgaaacaaagccgaagaaataacgctttgaagtgaaagaagaaaagggacgtgcgtctttttcttctttttttataaaaaaacgggaggcgaatcaggtgaaaccgatgatccgcgcgatgaaaacaaacgatatcaaacaggtccggcaagtcgcagaacgaagctggcatcatacgtatgaagggattattcccagacacattcaagatcagtttctcgaatccgcctatcaggatgagatgatggaacgccggctcttgcattctctgttctttgtggcagaagaagaggggcgagtgctcggttttgcaaatgccaccccggttcaaaaagacggaaatgcggagctgaccgccatctatattgacccggattgccagggaagcgggataggcacggcactccttaaagaaagcatcaggcagtccggcggggtaaaaaagctttatgtccatgcagaaaaagagaaccgcattgccttatccttttatcaagcgaaagggtttcaatgggtatgtgaatttgaagaagattttaaaggacacactttacagacggtcaaactggtactgaacatataaaagcgtccggcccgcccaaatggtcagtgataagccggaagccggtctttgtgcgcttcaaataagtcatcgcacaaagatatgatgtcattcatggaaagctcggcgcttgtatgcgggtcaagcatggccgcctgatatacggcttccttttttaatgtaacggccgcttcgatggttaaaagctgtgtgttaatgtttgttctgttgagcgccgcgagctgctccggaagttcgcccgaatagcacggcataatgtggtttttgacggctgtgcaaggcacttcaacgaccgctttcgccggcagattcggtatcagcccggtattcagcacattgccgccgaatgtgaacggtttgcccgtctccatcgcttcaataattctcgaaccgtattcttttgagcgttcgtgcgtcaggttttggttgttgatgatgccgtctctcatcgtttcccaattgttgatttgttccgcgcatctcctcggatattcatcaagcggaatttggagttcatctatcagctcaggataccggctttttataaaatacgggtgatattcggcattatgctcagatgattccgttacgtagcagccgaatttatccatcagctcaaaccgcaccatgtccttatgtttcgtcttttgtttttcgcgtgcccgtcttttaatttcaggatataaatcaattccgtcttttttaatctccaaaagccaagccatatggttaatgccggcaatgcgttcttccgtcccttcgtgatccatgccgagtgagtcaaacagatctttggtacatacctggacgctgtggcacaggccgaccgttttgacattcgtatgtctgagcatcgctccggtcagagaggccatcggatttgtatagtttaacagccacgcatccgggcagacctcttccatgtcttttgcgatgtcaaataaaacggggatggtgcgaagggaacggaaaatgccgcctattccgacggtatcggcaatcgtctggcggagaccgtaccgcttcgggatgtcaaagtcaatgaccgtcgcgggtttatagcctccgacctgaatggcgtttatcacatagccggcgtgtttcagcgcctgttttcggtcatcgtaggagatgatggatatactcgtattgtagcggtctctcatgttttccagcatgagctgggattctttcagccgtacagcgtcaatatcataaagcgcgaattcaaacccgtttaatgcttcagtcagtaagcagtcccccagtacattttttgcaaaaatcgtgctccccgctccgataaacgtaattttcttcaacagaaattcctcccttttcttctcagcctttgaccgccccggaggacagccctgagataaaatatttttgaagcgccaaaaacaatacgaccatcggcagcatcgccataattgcggctgcggcgactaagtgaagattgttcgcgttttcgccgaaaaatcccgccatggccacagtcaatgtctgcaccttttgatcttgtaaaaagaaaatcgcaaattggtaatcgttccagataaacacacaggaaataatgcagaccgttgcggtaatcggtttcaacaaaggaaacacgattgtataaaaagtcctgatcaatcccgcgccgtccatcctggcggcttcctcaagctctttcggaatggaagagcggataaaccccgaatataagaaaacggtcagcggcatatatgcagccgtattaatgagaatggctgcggcatgcgtattgatcagccccgcatcagcgaccatcttgtataaaggaaccatggaagtcaaaggcgggatgatcatgattgaaatcaaaaggccgaagacgattttgttcagctttgtatttcttcttgcgagcgggtatgcggcaagcgaacccatgaaaattaataaagcggcggaaacggctgtaatgataatcgtgttcagaaaggattgcccgagagaggcacgttcccatgcttcacgaaaattctgaaatgaaaaggcggatggcagcgaccattttgaactgtagtcaccttttgcttttaatgacgtggtcagcaaaatataaaaggggacaatatgaacgcacgagataacggctgccaacagcgtaaaaatccgcattcgggctgttttcatgacatttccgtctcctttcgcttgaaatacacgagagccgaaaagctgatgacaagaataatgacggacataaacacgccttgggcggcggcatatcccgcatcctgccgtttaaaatataaatcatacataaacgttgacatcgattgagaggaattgcccggcccgcctgcggtcagcgcgaaaatgacatcaaacagcttcagcccgccgatgatattgatgaccatgttgatggtgacagccggcatcaataaaggcagggtgatggtgaaaaacggctgaagacctcccgcgccatccatttttgcggcttcgtaataatctttcggaatgctttgcagccccgccaaatatacaatcatcgcaatgcctgcgtattgatatgtgttaatcatgacgataatccacgggtttgccgcagggcttgccaaggcgttgacaggaccgattcccagtgcgccaagcacatcattcagcgcacccccgtcatatgagaaaataaaataccaaatgtatcccataatcagcggactgataatgacgggcaggtagacgatcgttcttgtgagcgccttcatttttaagctctgattcaaaagcagcgcatataaaagtccgagcatattctgaaaaaaagtgcttccgatgccgtaaagcaaagtgtttttcacaacaagccacgtgtccggatctgtaaaaagccttttatattgagtaacccccacccattgatacgtctgtgagaagccgttccagtttgtaaatgtgataaaagcgcctttgacaaacggaaaaatcatgaaaataaaaaccgtggcaagagcgggaacgtacatccaccacagtgacgcgggttttaccggcttttgatgttgaaatccttgggtttcttttgcaagatcactcattctttttcagctccccatgaatcagattgaagccgaagccgcttatattccctgccgagtttcgctgaaatttcagcgggggttaagatatcggccatcagctcctgcccggctgttcccatcacatcccacattccgttcggcaaataaaggcggtcaaaataaggctgcaccttaatatgctgatagcgcttatagtcatttgcgtagaaaatgtccgtttgcacattcactaatccggccggaagcgaggtcgcttcggcaattgattttgcatgctcgggtcgggccataaatgcgataaactgtttcgcttcttcaagccgcggggaatccttgaatgccgccagcgtgtaacgttcgcctccgatccaaaccggcgcgtctcccttatggacggccggggtcggtatgatgccgacttttaccttcggattgatttgagcgacgtcttggccgagggtgccgccctgcagcgtaaaggcgattttgttttgcgccatcagttcaatgagctgggaccgttttgccgtcacggcatctatattgagcaggttttccttttgcatctctttcagtttgtcagataaataggtgaagtgtgtccagcggaaggttccgtttaacagttgttttttgtaacggtgtgcgggatctgtgatgagaagcggtgcggcgaattgatcgtaatattgggcaaatgagcttttctcatagccggcaaaccagaagggggtgactgttccgccgcttttttctttaatctgtcgcagtgccttcataaaatcatccattgtttccggcggtttgattccgtatttttctaacaacgtacgattgtaggccagtccgtcctttgcctgattcagagggaaggcgtatattctgcctttggcgtctttgagcatgctgtttaaattcggatcgagccgcttcgtccaagacatgccgctgaggtcggcggtatattctccgtagcggattttggcccagccgtgtgtgtcgaaaagatcgggcatatcaccggccgccatcctgaccctcatcatattttcgtagtcattgcctgggaaatgaacgtttacttgaatgtccggatgttctttttggaatgaatcagccaactttctgaatacggcgcgttcgctgtctgaggatatggtggaatagactgtcaatgttttctgcttttctccggcgccgctctgttctgccgagcagccgggaagtatcatgcaagtaaaagaaagaaacaaagccagtaagcgtttcatcttttcctcctttaaatatgatataaacgctgcgggacacgtcaccacctttcttgtgagccgcagctttgtctgacaatcaatgaagtggggagcgtcacggccagcgggacggttctgccgtttaaacggtcgagaagcaatttgacacccgtccggcccatctcttccgtgtatacttttaccgttgataacggcgtgctggcgtattctgcctcatcaattccgttgaagctgacaaccgccgtatcgcgcgggacttgaaggccggcttcctgcaaggcttttaaagcgccgacagccatcgaatcacttgcgataaaaaaggcatcggggagacttccgcctttgacggcttcattcatcagccggaacccttcgtgcatgctgtattcgccgatcagtacatgctccggctcggcgccggccatttgtaagaaagcggtcagacgcttatcctcaatcgttttattgctgtttacaccgtctatgacggtatgttcccgctcccggccgccgatataaccgagccgctggtaaccgagcgacagtagatgttctatcgccttttgcgctgcggcataaaaatccacgctgacggaatcgtagcgggcgggatcgggggtgccgttaacaaataccgcgtgcctgaaagcggcgctgatattcgtaagcgcctcgtcttgcaggctgccgatgacgatgacgccgtccagttcgtgaaacatatgctcttgaaaagaaccgagatggatagaagatgtgataaaaattttttgccgaaagcattcttcttcaatgccttttcggatcgccgaaaaataaggatcctgccgttcttcttccggtgacaggcagctgacaacgccgatcaggggcgctgaatcgctgcggctgcggttcttccgtttttttgccgacggctgatagcccagctcatcggcgatcctcagaactttttctcttgtttcatcagtcacagccaaagagtcatccttattcaaaattctcgatactgtcgcgctggatacagatgcctgtaaggcaatatctttgagacggaccatttcgcatctcctttttactaaatatttactaaacagaaatgacctggttattgttaaaatgatattatcatacgagagtaagcgttttcaataactatttttggttacttttagtaaaaatcagtaaaaaagaaaatctgtttttctctatcatatttcaattgaaccggaataaattgatagagaaaggagagggtgatgtgctgaagatagctgtttttgatgaggagcatgaaaaggatctgcagactgaagtcaatacatttttaaaggggatttctgatgaacagctcgttgatattaaatatacggtagcggcggcctgtgatcctgaaggtgagcagctttattgtttttccgctctcattttataccgaaaataaaaaagcccggacgaaatgccgggcttcgttgttcattatgcttttttgacgcggggacttcttggtttttggtatttctccgcttgtttgattccttttctctcgctcgctaatgacttgtacagagacacgatcatcagaaggatcacgactgaaaacggaaccgcggcgagaatggccgtgttttgcagtgcggccagaccgccggaatataacaaaaccgctgccacggcggactggatgacgccccagatgattttcacccggtttgacgggtctaaagagccgtaagacgtttgcattccaagcacaaatgtcgctgaatccgctgatgtaataaagaatacagcgatcagaacaagcgttaatacggatgtcaccattgtcagcggatagtggctgagtgcgccgaacagcatcgtatccgttgacattcccgcgacattgaatacgcctttctgctgaagatccatcgcggatacaccgaagatcgcaaaccataagaaagccaatatacaaggtgtcaccaacaccccgattaaaaattcccggatcgtccggccccttgatacacgggcgataaaaatgccgacaaacggcgaccaggatatccaccaggcccaatagaaaatggtccagctgttaatccattcgcgtttttggggatcattcggagacaagcgaaagctcatctgcacgatattttggatgtattggccgatagaatcggtaaatgagttcataatcagcaccgtcggacctgcaatgagcataaagatcattaaaatagccgcgagcgccatgttggtattgcttaagtatttaatccctttgccgattccgctccacgcagaaatcaaaaataacacggtcacgacagcgatcaggatcagctgaacggaaaatgttttcggaatgccgaataaataatgcaaaccgccgttgatctgagtcgctccgagccctaagcttgtcgccacaccgacaacggtcgcaaacacggcgatacagtcaatcgctttgccgatcggcccgtttactttatcgcccaaaagcggtgtcagtgtgctgctgatcaaaccgggcgcgtcttttctgaattgaaaatatgcgatacataaagcgacaaccgcatagatggcccaagcgtgcagcccccagtggaaaaatgtgtaccggagcgcatcacgaaatgcttggggcgtttctgtttcacctgagggagagctgatggcgtaatggctgatcggttccgcagccccgtaaaataccaaaccgattcccatgcctgcgctgaaaagcatggcaaaccatgataataagccgaattccggtttttccccgggttttccgagttttattgtgccgatcggacttacaatgagaaagagacagaaaccgacaaatatagaaacgaccagcagataataccagccgaaagaatccgtaataaatttttgtgccgtatcagtgacttgctgcaggctgtcaggagaaatggccccccataaaaccgcagcggctgtgatgacaatcacaatccaaaaaacactggagatgttcttcttcaaacgttctcaccctctgactatttttttcaatacgccattttgttttagtatggtcgtacgattgcagatcaatcctttcttcctattccctcaatcaggtgaaacaaaacgcagaaaactctatcatgtttttggtcaattatcaacggggacgctcaggtaagtgcgctttaaaccatttagagcgagcgtgagaaacgtcctgcattcaaaccggcgagacgccccgtaacaaaggctgaagtgatattgtagcccccggtatagccgtgaatgtcgagtatttctccgcaaaaatataagccttccatttttttagacgccatttgtttcggctcaatctcttttacggaaacacctccgcctgtgacaaacgctttgtccaaagaaagcgttccgtcagcggcaaccgtaaattgtttgcagtctttgacaaaagccctgaattgatccttcggcagttccgtaaagcttgtctgcggatcaagaccgttccgttccagaagaaaaagcaggtaccgttcctgcatccacggcttcagcgcgtttttgagcgcttttttcggtgcgtctttcagttccttgtgcatcttttgaaataactcttcctcgttgatgccgggaaacagatcgatgcggagtttgacctctggctgctttttcagttctttgacgacaaactggctgcagcggagaatggcggggcctgacaagccgaaatgggtaaacagcatgtccatcacgtgtgtgacgattggtttgccttttttattcagaacgctgacggccgcgtttctaagagacagcccctgaagtgttttttgtttaataaacggttctgacgacgtaaccggcacttccgtcggaaagagttcggtcacggtatgaccggccgcttccgcccatgcatagccgtctccggtgctgccggtatgcgggactgattttccgccgaccgcgataatgacggcgtctgcgttaatgtgttcgtcattgtttgtcgtaatgcctgctgtcctgccgttctcgtaccgcacttctttgattttttcatttgtgcggatggtgacattcagttgttttaatcggttcaaaagcgcatcgacaacgctttgcgctttgtccgtcaccgggaacatgcgcccgtggtcttcttctttcagctgaatgccgagtttttcaaaaaaggcgatgatatcttcattattaaattcggaaaacgcgctgtataaaaagcggccgttgccggggatgtgtttgatgatttcttcaacggggaggcggttggtcacgttgcagcgcccgccgccggaaatcgccagcttccgtcccagcttgtttcctttatcgattaataatacgtccgcgccttcttcgcctgccgcaatcgcagccattaaaccggacgggccgccgccgatcacaatcacgtcataatgtttcatctttcatcaacaactttctttttcacgtataataggcggaaatgtccgctttctgctattatagcgaaagaaagggaatccttaaacgtattttgttttttaaagagttttcccaaaaagtttcccgctgtaattattaccgtctaattgcccagttgtgttaaaatagaaaagttgaatcttcgtagaaaatggtgatgaggaaacatgtcaagcaaattgttaaggggcacgttcgtgctgacgctcggcacctatatatcgcggattttagggatgatttatctgatcccgttcggagcgatggtcggagcgacgggcggagctttgtttcaatacggatataatcaatatacactgtttttaaacattgccacgatgggatttcccgccgcggtttcaaaatttgtctcgaaatataactccaaaggagactatgagacgagcaggcggatgctgagagcgggaatgtcggttatgctcgtaaccgggatgatcgctttttcaattctttatatttcggcgccgttttttgcggaaacatctctcggcggcacgagtaacaacggacttacgattgaccacgtcgtttatgtcatccggatggtgagtctggcacttttggtcgtgccgattatgagtcttgtgcgcggttttttccaaggtcatcagatgatggggccgacagccgtttcacaggttgtggagcagcttgcccggatcatctttttattgggcgcaacgtatttgattttaagagtgatcaacggcggccttgtcatcgcagtcggatacgcgactttcgcggcgctgatcggatcattcggagggcttgtcgtcctttatatttactggaataagcggaagggcgatcttctggcgatgaagccgaatctcgtcccgtctgcgaacttaagttataaaaaaatgttcattgagcttttcagttatgccgctccttacgtatttgtcggactggcgattcctttgtattcttatatcgatacgaatacgtttaataaagcgatgattgcggcaggccataaggatatcagccaggacatgcttgcgattgtcactctttatgtgccgaagcttgtcatgatcccggtttctctggcgaccgctttcggtctgacgctgattccgacgattactgaatcgtttacgagcaggaattataagcttttgaaccagcagattaaccagacgatgcaaatcattctgtttttggttattcccgccgttgtcgggatgtccgtgttatcgggtccggcctatacgttcttctacggctctgaaagtcttcgcccggatatcggacaggatatattgttctggtacgcgcctgtcgcgattctgttttctctgtttaccgtaaacgccgcgatcctgcaagggattaataagcagaaatttgctgtcgtgagccttttcatcggcgtcattataaaagtggtgctgaacgtgccgctgatcaagctgtttcagggagacggggccatcttggcaacggcgctcggttatatcgcttctcttctgtacggttttattatgattaagcgccatgcgggctattcgtatacggtacttataaaacgggtcattttaatcgcagtcctgtccgtcgtgatgggagtcgcggtcaagctgactcaatggctgctcagtttctttgtaacataccaaagcggccaggtgcatgcggcgattgtcgtctttgtctgcgccgctgtcggcggtgcggtatacatgtttgccgcgtaccgaatcggatttttacagaaaatgtttggaaaccgtctgccccgcgttttgaggagaggcaggcattccgcccattgagaaataatgaatagtccgcttatcgcgggcttttctttttaaaggagaggatcaggatgagacttgataagctgcttgccaacagcggattcggctcaagaaaagatgtgaaaaaaatcgtcaaggccggggctgtcatgattgacggagagccggcgaaagatgtgaaaacccatgtcgatccggaaaaacaggacatcacggtatacggagagccggtagactatcgtgaatttatttatgtcatgatgaataagccgcaaggagtgctgtccgctaccgaagacagccgccagcaaacggtggttgatttgctgacgcctgaagaacagcgatttgaaccgtttccggcgggacgtcttgataaggatacggaaggctttttgcttctgaccaatgacgggcagctcgctcatcgcctgctttctccgaaaaagcatgtgcctaaaacatatgaggtccggttaacctcgcctctgtcaccggaagacatcgttcatctggaaagaggcgtcgtcattgaaggaggctataagacgaagccggcagccgttgaaatcattacagaaagcccggatgaaacggtgattcacttgaccattacagaaggcaaatatcatcaggtgaagctgatggcaaaggctgtcggaaatgaagtggcttatttgaagcggctttcgatgggggctgtttctcttgacccggatcttaaaccgggagaattccgcgagctgactgaagaagagctcgaaacgctgagaggcgctgaagtgtaatcgatatcagaaaagcccaaaacagatttgttttgggctttttatatagaggaacaaaaaacaaggcaaagacgctgctttgccttgcagcatgtcaggccgaaaagggccttatgtaattgttcgcttaagatgtaattttcactttttttcgtgttgtctcccacttgcctcggctaggactatgaacaagatcattgtatgctaacacatttaagtctcgctgaatggttctaggtgtaatgccgaattcatcaaccagttcctgtgttgtcacaaggcctttttcctggatgaacatgtaaactgatttaatccgagtcagcatacgatttgttgaaggtttcaaaaaaccactccctatcataagatcggatggacttgatataccacaactttcgactctaaaacttcgtacgaataagcaacaaaggatgacattctgttttttctcttttaactgcctccattatacacgatatggacaacatgaatctaggaataagcgcagataattttttccaaatgggtgccgccttggtgcattactatgcccggtccgcttttattattatggaaactgaaactttttttatacatgtccgtatgaaaacgggggagtgagaagtttgggagaattattgaatgcaaacattgtctgcgccggttatgctgacaggccgaaggtgatttctgatgtatctctgtcagtcaacgctggtgaaattaccggtttaatcggagcgaacggcgcggggaaaagcacagtgataaaggcggttctcgggctgtcccgggatatagagggcggaattgagtggaatgattcatcttatgcttacataccggagcgtccgagtttttatgatgaactgacgctttgggagcatctcgagctgaccgggtcattgcggggcatggaaggggaagagtgccgtgagcgggcagggcggctgcttgaagagttttcgctgacgtctgtaaaacatgatttgccttccggtttttcaaaagggatgcagcaaaaattgatgctcatacaggcatttttggcgaagccggatatttacatcattgatgagccttttatcggacttgatccgatctcaacgaagctgtttaccgacatgctgattgctgagaaagaaaggggcgcggggattttgatgtgcactcatgttctggatacggcggaaaaaatctgcgaccggttttatttgctggatcagggcgctctgcttcttcaaggcacgttagaggagcttcaggaaaaaacggggagccgttcactgctggattgcttttattcagcggttcggagcagtcagcgatgaccgggcgggctttgttttttcaaaggctgtttcattattggcggtatcaatggaaggtgtttcagacggtcattgattggacggtcgcgctgtatatcgttcttcccgctgccgcatttgccgtttatcaatatgctgaatggctgaacggcagggggcttcttaatggagcggcaggagtattaggatggggctggctgtatgtattcagtgccctgctattgtgcacgggttttattcatacctttttgctggaagcggatcacgtatttttggtgcatgcaaaacatctgatgcaaaagctgaaacggtacgcgcttttgtattcgatgttcctttcccttatcaaatggggtgcgcttgccgtattgttatttcccttatggcgccaatacggtgactgtaccttaccggcatattcgggtatgttttgctgtctgttcggcttccatactgcaatattagcggtgcaccgacacagaaaaaacagcaggcggacattcgggaatcaggcggcaggctggctgaaagtgatggttctgatggcgggtgcgttttttatgatcgtctttgccgccgaatggtattggctttggccggcgggatgtatattgttcatctgttccgctcttttgacttggaaagggacggagacattatcggcctttgaggaagaagtgcttgaggagaacaggcgcaagctttcattcgcggcctctgttttgatgctcagccatgatgtgcagctcccgaatggtaaacataaagggcggagcaagccgtttttatatcccggctcaaagcacatctttacaaaacggtcggcgtatacggcgtggaaagaattgttctttaaagtgctgatccgaaacggcgggtatctccggcagctttaccttttaaccgcggcttttacggctcttattctcgttcttccgctcttagtgaagccggcagtcctcattttgtttgcaatcgtcagccgctatgccgcgtcacttttatttgaccggatcacggataaaccggttttaagcggtatcaagagagacagtgatgactatttcagggcgcgaaacagcgcattaaccgtcatccaagtcatctgttccgcctggtgtctcattgccgcgattctttccgttctttatatgtgaaaatccctttccgaaaaaggaaagggatttttcttaatgtccgttcaaaataaaaagctgaataaaaaacagcacggcgaagatgatgactaaaggatggatttcgcgccattttttcttagctgctttaacaagcggatatgaaatgaagccgagtgcgattccggttgaaatactggacgttaaaggcatcgccaaaatgacgagaaaggccgggaacgcttcatcaagctcattccagcggatattcgataccgcacccatcatcaggctgccgacaataatcagagccggtgacgtaatcgcggacacttccgataagacgctgacaagcgggctgaaaaacatggaaacggcaaacataaccgcaatcgtcagcgccgtcagacccgttcttccgccggccgccacacctgctgaagattcaacgaacgcggtcgtcgggctggtgccgaagatgcttcccaccgtcgtagcggtcgaatcagccaaaagcgctcttctggcattcggcagctgattgtttttgatcagtcccgcttgttcggcgacaccgatcatggtgccggtcgtgtcaaaaatcgtaacgagaagaaaagaaaacacaacggcgtacagaccgtgatgcacgacatccccgagggctccgaacggatttgtgatcaaaagcccctccggcaggtgcgggaaggacatgaatcctttcgtgaaatgaatctgaccggtcaaaaaggcaatgatagcggtcagcgccattccgatgaacagagccccgttaacattcagcaccatcagtacaatactgatgataagcccgataagcgttaaaatgacggcgggcgaatgaagatcgccgagtgcgaccagattagatttatcagccgtgatgattccggattggcgtaagccgataaaagcgataaataagccgatgccggtcgtaattccgtattttaaattgtccggaatcgcttctataagttgttttcttaaaggcgttaacgataaaataataaagatgactcccgcgataaaaacggcgctgaaagccgtctgatacgtaatgccgctgcctgtgccgacaacgtgaaaggcgagatacgcgtttaagcccatgccgggggcaatggcgatcggaaaattcgcagcgagagccatccataaagttccgacaatggaagcgataatcgtcgcggtgaacacctggtcaaacggaattcccgcattggaaaggatcaccggattgacgacaatgatatacaccattgtgaaaaaggtggtcaatcccgcggtaatttctctttttattgtcgtttgatgcttgtcgagatgaaacataagtacctccaatgacgaacattttttcaaaacatcatctatattattcgttttatcgacattttgcaagtctttatcaagaaaggggatttgtgatgaactgggaagttgaagtcatcagaaacaaagaagatctgatccgtgacacgcagaagtttttgcagatcaacagcgtaatggacgaatcaacagccggtcccggccggccgtttggagaaggcgtcaatgccagcctgacgtcactgctggaattcggtgaaaaagaaggcttcaccgtaaagaatcttgatggctatgcgggccatattgaatggggaacgggtgacgaaatcgtcggcgttttgtgccacgtcgatgtcgttccgcccggagacggctggacgagcgatccgttttcagccgatatcagggacggccggatatatgccagaggcgccatagatgataaagggccgacaatggcggcgttttatgcgctgaaaatcgtcaaagacatgcagctccctttatccaaacgcgtgagaatcatcatcggaacggatgaagaaagtgattggagatgcgtggatcactacttcaaacacgaaaaaatgcctgacatcggctttgctcctgacgcggattttccgatcattaacgcggaaaaaggaattatagatgcatcactgcgcattgtaaaaagcgcttctgacaaagacgcaaaaaatgggcttctgtcattccgttcaggactgcgcttgaacatggtgccggatgcggctgaagcggttattgaaggggacggtcttgatgccgtgcacgcatatttcagcaaatggcttgagcagtcaaaaacacagggtgaagcagtttcggaaaatggaaaactgacgcttcgggtatacggaaaatcatgccacgcgatggaaccggataatggtgtcaatgccggcttaaagcttgctgaatgccttaacggaacagagctggatgaagccggaaagcactttgtcaaaaccgtcagtgactattttttaaatgatacacgaggcaaaaaactgaaaattgattgcagggatgacatcagcggagagcttacattgaatgtcggcacctttacatacagaaagggtgaggaaggagaactcggcatcaacatccgttatcccgtcacttcagacagcaaagtcatccgtgatgcttttacgtctgctgaagaattccggcttgaagaatttaaagacagcaaaccgcaccacgtttctgccgatcatccgctcgtaaagacgcttcaaaaggtttacgaaggacagacgggaaagaaagcggatctgatttcaatcggcggaggaacatatgcgagatccctttcggcgggcgtcgcgttcgggccgctgttccccggccggcctgacagcgcgcatcaaaaagatgagtacatcgaaatcgatgaccttctcaggtcaacggctttatatgccgaagccatttatgagcttgccaagtgataataaaaagggacgccgaaagcggcatccctttttatcattcaaatgaccataaatccgttgataaataacgttctcccgtatcggccgtcatacagatgacgatctgttcggaagggaggcgttttgcggtttcaatggcggcgaagcaggcggcgcctgaagacgggccgacgagtataccttcttcccgggccagacgacgtgttgtcgtatacgcatcttcatcagatattttcatgatttcatcgtaaatgtcctgattcagtatgccgggaataaatccggggcttgtcccgacaagcttatgagcgccgggttttccgccagacaggacgggagatcccgcgggctcggcgacatgaacaatcatatccgggaaaagctccttcagcgtttctccggttccggtaatggtcccgcccgttcccgccgttgccacaaaagcaccgagcggtctgttgagctgctgaacggcctgatagatttcaatggcggttgtttttcggtgggcatctggatttgcgccgttatcgaattgcatcgggataaaacttcccggaatctgttcggcgagttctttcgcttttttgatgctgccgggcattctttccgcccccggtgttaacacaacctccgcgccgtacgctttcaggaggttgatgcgttctttcgtcatcgtgtcaggcatgacgaggattgccttgtagccgcgcgccgccgcgttcatcgccaggccgatgcctgtgttgccgcttgtcggttcgatgatgacagagccgggttttaaatgcccgctgttttccgcctcaatgatcatattgtaagccgctctgtctttgacactgccgctcgggttaaacgattctaattttaaatagacctgtgctgcatgttctggctgaagacgattgagctttacgatcggtgtgccgccgatcagctccgccgtgctgtttacgattttcaaggccggctcattcctttctgtataaaacgttcggtacataatatcctatcataatgagcggacagggttctcctctccgcttatccgttttataataacactataaccaaagagggggagatcctcgtatgaaagcttcattgccgcattattttatcggcattccgattccggctgacattgctgaaccgatttgggaagcagccaaaaaggagccggtgttaacatttaaaaaatgggtgcacccgcatgactatcatattacactcatttttctcggagccgcggatgaagaacggcttgcgaaattatcgtctctgctcgcagatgctgcgtcggcagcgcagccgtttaccgtacagtttcagcatctggatattttcggcgaccgcagacagccgagagtgcttcaccttgagcccgaacggaatgaactgctctttgatttgcgggaaaaaacaaaacaggctgttttgaaagccggttttcaagtggaaaaacggccttatcaccctcatatgacgatggcgcggaagtgggcgggagaccggccgtttcctgacgatgtgccgtttgaaagcggcagggtgcaaagtgccgtcagccggttttccctgtttcagacccatcttgaccggtcgcctaaatacgaagaaatcgcacagtttcaattgacataaacaaatattcggagtggagaaatcacatggcacagatcatcaaaattcacgactgcatatccagatatgaacttgatccatatcattatatgaaccagtttatccggctgaagaaagaacgctgggaggcgcttcttgaagcgtttgaccggatgacggaagaaaaagaaacggaaacggctgcaggcggggaaaccgatcaagcgccgggcaggaaaaaattttccttaaaaaagagaaaagaagaaaatacggccgatataaatgaaaagaggcaccaatggtttgatgagccggagggagaagaggcgctgttcgggaatcttccgtctcaaaagtctgagctcgcgccttttttcaaagatcagctgtatgactttcaattaaaatgggcgagctccacgctttctcaaaagtctgagctttcgcaggcggtcaaaggggacaggatgttaaaaatgctggctcaaaagctgcccgattcctattttgtgatgtatcatccggttctgcaaattcagcaggcgtccgtcgaactgagcattatcatcatctcgccgctggagattttctgcgctgcttttatggaagcggaagaggacagcgtatatatcggatcaaaacaccgtttttgggaagaaagaggctccggcagcacacgccaagtattgaatccggctctcagcctgcagcggacgggctcggtcgtttcgcaaatcgtaaaagaaaagcaggccgacattcccgtgcggaagcttttactcagcagaacgtcttatattgattacccggagccgccgtacgggctggaaatagctgataaacggactgccgcagggtggctggaaaagcagcagaaaaatacggcgccgatcaagcaccaccagctgaaggcggcgaaggctcttttgtcttacggcttgagcgattcaagccggagacaggaatggcttgattaaagcggacgtttgccggctgtctcttcatctatgaagcaggtgaaaacaaacgatgagtcaatggttttttattattaatccggtctcaggaggcgggcggggccggcgtgtctggaaatcagttcaaaaagagctgaccaggcgcggggtcagccaccgctcttttttgaccgggcatcccggacatgcggaggtgctggcgaggcagatttcaatgatgcaggatcataagcttaagcggctgttcgtcatcggcggtgacgggacgatgcatgaagtcattaacggactgaaaggaacggatcagattgagctgacctttgtgcccgccggttcgtacaatgacttttccaaagggctcggtattaagaagtcggcgcttctccaagaaatcaaaagtctgcaccgcccgctgacacggaaattttttgcgggaaacatcaacttttttcatgacaaagcgcaatcactttattttattaaccacctgtctgtcggcttcgatgcctcagttttgaaggcagccgcgaattttccgttatcgcgcgttcttcggtttttgcgtctcggctttgtgatttacccgctcgcgcatttacatacggcctcggggtttcagccgttcagatttgtttgcacggcagacggccagaggcgagaattccgcaatgtctggtttgtcattgcggctaatcacccttattacggaggcggcatgaaagcggcgccttcagcaaatccccgtcaaaaccattttgatattgtcatcgcagaaaacctgtcctttttctcgctgtatcgttttttatgggcgatgagcttcggccggcatatcaaaatggatggagtgacgatgataaaggggaaggaattcgtttttgaaacagatgggaaaattccgtttcacgctgacggcgagctgatcggaacgacgccgtttcggcttatgccgggcggtacgccgttgaaaataaaaacataataaacaaatgaaacccgtcaaatgtttcacggcaaagagcggttcgcggcataaatcttcagaattcacaggtgttcttgctagttttgcttgacgaagtttgtgctgtagcgctaaaatttataggacggctattgattagcatatgagactctcaatagctgtcttttttattctcatgaaattgtttatgacaggccgctccgccaatagagaaaggctggaggcctattctaaaatattttaagaaatgatgggttgaacattgatatgaactggttgggacaattactaggtagcgattgggagatcttccccgccggaggagctacaggagatgcatattatgcgaaacataacggccaacagctttttttaaaacgtaatagctcgccctttttagccgtgttatccgccgaaggcattgttccgaagctggtttggacgaaacggatggaaaacggagacgtcattacggctcagcattggatggcgggcagggagctgaaggcaaaggatatgagcggacgcccggtggctgagctgctccgcaaaatccacacatcaaaagctttgctcgacatgctgaaaagattgggaaaagaaccgcttgatccgggcgcccttttgtcgcagctgaagcaggccgtctttgccgtgcggcaattttcgccgcttattcaggaaggccttgcttatttggaagctcatgtggatcaggtgcaattcggtgaaaaagtcgtttgccattgtgatgtgaatcataataactggcttctgtctgaagacaaccagctgtatttaatagattgggacggcgccatgatagctgatccggccatggatctcggccctttattgtatcattacgtcgaagagccagcgtgggacagctggcttgggatgtacggcatgaagctcacggaagggcttcggctgaggatggcatggtacatgttatcggagaccatcaccttcatcgcctggcacaaatcaaaaggaaacgacaaagcgtatcatgatgccatggaagagcttcatgccctgatgaagcggattgtcaagtagtcaggagtacgaatccatctgctccacccattgggacaaatggttttggtgctcctgaatatgcgtgtcgatggaatcggccgtaatgccggactggctgtagcggtagacatcctcgagcacgttttttatatttgaatcaagcccggtgttggccatcagtgatttgatgacgcgctccagctgttcatactcggcaaccgtgccgcagcaatccaattgatggtcggccaatatgtcctttaataaccggacctgatgttcgcttgttaagcccatgattcatatacacatcctttctgtgtcatacattgtgcaaagcggtgcggttttatgcatcacatgagtgttccggaccggggagcctctttttttatgcagccggcgcctttaaaaggcgcttgcggctctttatgtttcatggtatgttgttactcgaaattatagatagaggtgtcaatcatatgagaatgcgccataaaccttgggcgaatgattttctggcagaaaacgctgacatcgccatcagtgatccggcccagtataaagggcggtggaacacggtctttggcaatgacaacccgatccacattgaagtcggtacgggaaaagggcagttcatttcaggaatggccaagcagaatccggatatcaactatatcgggattgagctgtttaaaagcgtcatcgtcactgccgtccaaaaagttaaggacagcggggctcacaatgtccgtttgttaaatatagacgcggaaacactgaatgacgtatttgaacggggagaaatcaagcgcgtatatctaaacttttctgacccgtggccgaaaaaccgtcacgaaaagcgccgtttaacatttaaaacgttcttgaaaaaatacgaagaagtgatgggcgaaacaggtgagattcattttaaaaccgataaccgcggtttattcgaatactctctgaaaagcttttccgaatacggcctgcttctgacggaagtcagccttgatctgcacaacagcgatccgaagggcaatattatgacagaatacgaagaaaaattctccgcgctcggccagccgatttatcgggccgaagttgaatggagaacaaaagacagactctgatgcgggagtctgtttttttatgccgccatttgctaccattacatcaggagggatcaagatggagacattgaatattgggaatatttcattaacatggctggacggcggtgtaacgcatatggacggcggagcgatgttcggcgttgttccgaaacctttatggtcgagaaaataccccgtaaatgacaaaaaccagattgaattaagaacagacccgattctgatcagaaaaaacggcctgaatatattggttgacgcgggtatcggccgagggaaattctcagataaacaaaaaaggaattacggcgtaacacaggaatccaatctgaaacaatctcttcgtgacctcgggctttcctgtgaggacattcatatcgccgcgatgacccatcttcattttgaccatgcatgcggcctgacggagtacagcggagaggagcttgtctctgttttcccgaatgcccgcattatcacttctgcaacagagtggcgcgaaatgagaaaccctaatatcagatcgaaaaatacatattggagagaaaattgggaggcgatacaagatcaggttgaaacctttgagaacgagtatcagctgacagaaggcattacgatgcaccacaccggcggccacagcgacggccacagcgtcatcgtcttagaagacggtggggagacggctgtgcattttgccgacctgatgccgacgaatgcgcataaaaatccgttatgggtgctggcctatgatgattatccgatgacctctattccagaaaagcagaaatggcagacgttcgcggcagaaaaagacgcctggctgattttctatcacgacgcgatttacagagcggtaaaatggggagaagacggcgaagtggctgcatctgtcaagcgggagagaaaataagcggatcgatgatttacctgtatgaatttcgggaataaaagcaaacctaagacaaattgctttgaaaggaagagacaggtgaatcaatttcaagtgatgaaagatggagaaatcaaaacaactctgcgcggattagaagtgctttctacgccttttttaaataaaggggtggcctttacacaggaggaaagaaaggaactcgggctcgagggatttctgccgccgaaagtattgacaatcgaagagcaggcgaggcgtgcctacgaacaattcagttcgcagcctgatgagctgagcaaaaatgtatacttgaccgctctccatgatcggaatgaaacgttattttacaggctgttaaatgatcatttaggcgaaatgctgccgatcgtatatacgccgaccgtcggcactgcgatccagcgttacagccatgagtacagaaaaccccgcggtctgtatttgtcaatagatgcccctgaaggaatgcgcgccgcatttcagcagttcggaaaaaatgaaaacatagacttaatcgttgccacagatgcggagggcattctgggaatcggtgactggggcgtcggcggcatcgccatttctgtcggaaaacttgcggtgtatacggcggcggccggaattgatccgtcacgagtgcttgcggtcgtattggacgcggggacaaatcaggaaagcctcttaaatgacccgctgtatgtcggaaaccagcattcaagagtgcgcggcgagaaatatgaccgctttattgatgagtatgtctcgcttgcccgggaaacattcccgaatgcgctgcttcattgggaggatttcggtacggctaacgcccgcggcatattaaagcggtataaagataaagtctgtacgtttaacgatgacattcaaggaacgggcgcggtatcgcttgcagctgttttagcgtgtgcaaaagcatcaaaagtgcctttaaaagagcataaagtcgtcgtcttcggcgcgggaacggccggtatcggaattgctgagcagctgcgcgaagccatggtgcatgacggattaagcgaagaagaatcctacagccatttttggtgtatcgacagaaacggattgttaacggatgatatgaaggacttgcgtgattttcaggttccgtacgcgcgccctgctgatgaagtgaaagagtacggccgcagcggtgaaggcggatcaattgatctggcggagacggtgcgtcaggccaagccgacgattctgatcggcacatccaccgtatcaggcgcatttacggaagaaatcgtcaaagaaatggcctcgcatgtcaaacggcccgctattttgccgatgtcaaacccgacgacattatcagaagcaaaacctgaagatttgattaaatggacggaaggccgcgcgcttgtcactacgggtagtccgtttccgcctgttgcgtataacggcgttacctaccatatcggacaggcgaacaacgcgctcgtattcccgggactcggactcggcacgattgtgacaaaagcaaggctcattacggacaatatgttcgttgcctgcgcgaatgccatcgccggtatggtggacgtcggcaagccgggggcgccgatgcttccaaaagtggaggatctcaggacggtatcggcaactgtggcggtagctgtagcaaaagctgcgattcaggacggtgtagcggaaacggaacccgaggatctgatccaagcggtgcaggacgcgatgtggcaccccgtatataaacgaattcggccgatgtaaccgaataaagcccaaaacgctgatggttttgggctttattttttgcttgtccgaattatgaggcgacagaatcaatgacatcgacaatctggcctgtttttgcattgaccataacttcatattgctccagttcgccgaatgccgaacgtgtcacgccggtcttgtatacctggatggtttctccgtttacctggtagggctccggctctgtgtaaatccatgatccgtctatcggcccgcgctgtttaaaagccgctttcacgatacggagcgctttttctgaagagatataaggtttcatcgcatactttttcactgcgatggcagcgcataatccgactcctgcacctaagagaaaatgacgtaatttcaatatgaagcacctccaattatgtcgtagtttttattatacagaagatgccagacggtgttaagtaaagcgtcggttttccagcccattcaatctgagcgcttggaaaacggttgtttttctaataaaataaaagcattacatagaaatgaggggaaaatatgaatgaggaaacgaaaacgcttttccggacgctgacgcagcttcccggcgcaccgggaaatgaacatcaggtccgctcctttatgaaacgggagcttgcgaaatatgcggatgacatcgtgcaggacagactcggaagtgttttcggagtaaggcgcggcgctgaagatgcgccgaccgttatggtagccggccatatggacgaagtcgggtttatggtaacgcagattacggataacggcatgctgagatttcagacgctcggcggctggtggagtcaggtgctgcttgcccagcgcgtcgaggtgcagacggataacggaccgattatcggcgtcatctcaagcatcccgccccacattttaacggatgcccagcgcgcaaagccgatggagatcaaaaatatgatgattgatatcggtgccgatgacagagaggacgcggtcaaaatggggatcagaccgggacagcaggtcgtgcctgtctgcccgttcaccccgatggccaacgagaagaaaatattgtccaaagcgtgggataaccgctacggctgcgggttaagcattgaactattaaaagagctgcacggaaaagacctgccgaacaatctgtacgccggggccaccgttcaggaggaagtcggcttgagaggggcgcagacagcggccaacatgattcagcctgatctctttttcgcgcttgatgccagcccggcaaatgatatgagcggcgataaggagctgttcggccgtctcggcgagggggtgctgctccgtattctcgacagaacgacggtcatgcaccgcgggatgagagagttcgtccttgatatggcggaaacgcacaatatcccttatcaatatttcgcttcaggcgggggaacggatgccggacgggtccacatatcaaacagcggggttccgtctgccgtcatcggcatttgttcaagatacattcatacaaatgccgccatcatccatgtcgatgattatgccgcggcgaaagaaatgctcattaagctggtcatggcgagtgacaaacagacggtcgaaacgatcagagaaaatgtgtaaaaaaataagcaggaccgtataaaggcggcctgcttattctgtttcaaataaataagagagtgctttcatcgcttgattgacggtttcgaccgtgatattcgcttttccggaaagctctttcagcggatgatgaagttctttcggacggatgagaatgagcggctttccttttgcgatggcataagaagcatccatcgcggtattccactgcttatatttctcgccaaacagggcgatcacaaaatcggctttttccatcagcacctctgtacggaaattgttgatatcagaagctctggcgtcttttaaaacagaatcgggctgcacgcccataatctcttctccgatattgtctgagcgttcatggttttccatcgggccgacaaacgtaatcggcaggtccagcgctgttgctttttgtttgatctcgtcccgccaattactgtggatttcacccgctaaatacacgacaaactgcatcttttgcccctccttatgtacatattcagattttcgtacggctacaagcaaaatggtaaacgaaacttgcttgataatgcaaatgaaatatgataatgatattgcatatagttggtcttgctgtaaacagtctggtatgatccaattggacaaacatcagcatataaaaaactcataatccagatggaggaatgacaatgaaaaagattgaaagcacggaagaattgcaaaaagcggtacaagacgattgggcggtatttatgttttcagcggattggtgcccggactgccgctttgtggagccgtttctccctgagctggaagcggactttcctgaattcacttattactacgtagaccgcgatcaatttattgatacatgcgcggaatgggaaatttacggcattccgagctttgttgtgtttaacggaggaaaagaagtgaaccgcttcgtcagcaaagaccgtaaaacaaaagaagaaattgagcaatttttaaccgattcccttgctaaagcataaaggaggccacgggctttgaaaatgacgtcaaggaagctggcggatttattaaaacagcgcctgcagcacgagaaccgatccttcttttttgacagagaaaaagacaccctccgtgttgaggatcaaacgaccaaaaaaggcatcacattggagctcccgccgatcattgcgaagtgggagacgaaaaaagaagaagcgatcgacgaaatcgtctactatgtgtcagaagcaatggaggcgatggaaggcagcggacaggagatgtccggaaaggaagccggtatctatccggtcatccgctccacatcatttcccgatcaaacgagcgacggcattcccctcgtgtatgatgaccatacggccgaaacgagaatctactacgcgcttgacctcggcaagacgtaccgcttaattgacagccgtatgctcgagaaagaaaactggacaaaagaacggatcagggagacggcgtcattcaatctccgctctcttccttcagtagtgaaacaggatacggttgcggacaattatttttattttttcagggcgaatgacggctatgacgccagccggattctcaatgattcgattcttcatgaatacaagcaggccgctgaaggcgaattggcgatttccgtcccgcatcaggatgtattaatacttgctgacattcgaaatgaatcgggttatgatattttagggcaaatgtccatgagcttctttgcaagcggcacggtgccgattacggccctttcatttctgtataatgaaggcagactggaacctgtgtttatcatggcgaaaagccggccgaaaaaggattagaaaggatttttcttatgaacgctttttacaataaagaaggtgtgggagatacgcttctgatctctcttaaagatgcggcacgcgaagaaattgcctatgaaagagaaggcgatgtcatcagaatctttaacaaagaaacaaaagaaacgacgggctttaacatttttaacgtgtcttcttacttacagattgaggacaacggccccgtcgctttgtctgagacattcgttcaggatgtgaatgaaatactgaacagaaacggcgtttcagaaacgctgacagttgacctttctccgaaatttgttgtcggtcacattgaatcgaaagaaaaacatccgaatgcggataaactgaatatctgccaagtgaatgtgggagaggaaacccttcaaatcgtttgcggcgcgccgaacgtggacaaagggcaaaaagtcgtcgtcgctaaagtcggcgcggtgatgccgagcggacttgtgattaaagacgctgaattaagaggcgttccgtcaagcggcatgatctgctccgcgaaagaactcgctttgccggatgcgccggcggaaaaagggattcttgttcttgaagacagccgcgaggccggcgaagcatttcaattctaactcccataaataagcgcacagaatcgaatgatgtgagagaaagccgttaagcaggcctgcttaacggctttcttcagttgggagcttaatcttttctgagccgcccggcaatggtatactaaatatcgtcccagactactaaaaagggagttagagagtgattaaacatgagttggctgaataaattttttgacttatttttaggtgaaaaagaagaagagcatgaacgtgaaccaaacacgcatgcccaaatcccgaaacagcagataccggatcagccagaaggcaaattcacgcgcatggaagatcctaaaatatattacgaatatccgaaagggaatttccgcttccctgtcgttccggacggctataagcgaacggagcaaaaccaaagacagcgggaaaggcacgaacgccgccagccgtcccgggattatgccgccgggaaggagcaaaccgagcggaaacagcatacacataaagagcctgatacggtgaaaaagccctttaaaccgtcatccattccttcaccggtttacggctttcaatctcagcacagcataaaaaaagcgcctatatccgaaaagcggcgtgaagagaacgtaacactgctgtcagaggagcaatttgttccgccaaaagccggtcaggaaacggaaaaagagcccgtcttcacaacatccggcataacaaaacagacgaatgaccggccagacccgtttgtgaaacaagaaacggaagaaatcccagccgttaaaaaagagaagcttcacaccgaggctgagaatgcaaaagagcaagtgtttgcagcaccagaaccgcagcagactgaagagcgggagcacacggaaagcgcggagtctgccggctttacagaagaacaagagcatgaacaaacccgcccgcagcctattaaagagcctgagtatgaagcatcccgaacggctgaaaacacagaggaacaagcggcgccgcaggaggaatatcaggagcctgagccggaaaaagcaccgccttttgaaaccgcagaagaaccggtgtatacatacacagaacccggatacgatgaggaagttcagccgcagtctgaagacaagcccgaatcagctgaaaccgacgcggaaccggaaacagactcgcagcctgagtacaatgaagtcacgcggcattcagaccccgagcctgaacctgcaagcatcgagacggccgatgccccgtcccggcctgccgaagaaaaaacagagcatcacggacagcctcagcctgtgaaaaaagcggagcggccgaaagagcgcaatgttccgtttaacgtcatgatgcttaaaagcgataaacacaagcagacgaagacgccagagggcggagcgagctatgtctttccgaatctgtcgcttctggacgtaccgccggcgcaaagacatgacgaccaatcgtggattgaagaacagcgcgagcttttaaacgttacgctgaaaaactttaatgtgcgcgcccaagtcgttcatgtcacacaaggcccgtccgtcacacgttttgaggtgcatcctgagcccggagtgaaagtaaacaaaattacaaacttagcagatgatattaaactgagcctgtctgccaaggatattcggattgaggcgccgatccccggtaaaaacacgatcggcattgaagttccgaaccgcgtaagcaaagtcgttgatttaaggcagatgatcagaagcgccgctttcaggacgaatccgtctccgcttacagccgcgctcggtgtcgatatttccggaaacccggtcgtcattgatttgaaaaagatgccgcacgggttgatagcgggtgcgacaggatcgggaaaaagcgtctgcatcaataccattttggtcagtctgctttataaggcggatccgagtgatgtcaaaatgcttctgattgatccgaaaatggtcgagcttgcgccttataaccaaattccgcatttggtcagccccgtcatcacggacgccaaagccgcgaccgccgcgttaaaatgggttgtggaagagatggaacggcgatatgaactgtttgcccattcgggtgtgagagatatcggccgctttaatgaattaaccgccgatcataagacaggcgaaaagcttccgtacctcgtagtggtcattgatgagcttgctgatttaatgatggtcgcgccgaacgatgtggaagaaagcattgccagaatcgcgcagaaagcgagagcctgcggcattcatctgcttgtcgcgacacagcgtccgtctgtcgatgtcattaccggaatgatcaaggcaaacataccgacgaggattgcattctccgtctcaagccaggtagattccagaacgatcatcgacatggcgggagcggaaaagctgctcggaaaaggcgacatgctgtactgggaaaacggtaccggaaaaccggtgcgcctgcagggaaactttgtatccgacagagaaattgaccgcgtcgtctctcatgtcagaaagcagctgccgccttcttatttgtttgaacaggaagaactgatcaggcagggaaccgccctcaaggaagaagacgaactgtttcctgaggcgtgccaattcgtcgtggagcaaaacagcgccagcacctcaagccttcaaagaaggttcagaatcggttataatcgcgccgcgaggctgattgacatgatggaagccgaaggcatgatctcagaagcgaagggcagcaaaccccgtgaagtgctgattacggccgctgacattgctcaagaataataatatcgttcatttttctcacaaacatggtatgatagtggatggaccatcaaaactgcatcactgtcacgcgctgaaatatcatgcggcaggtttaatcaaaaagaaagttacagatactgacgataacgtaaaaataaatggaagcgccgctgtgcgggctttttgcccgcggcggtcgcaaaatgaaatgagcgtcatatactggggaacagatagacgtttgttggaggtacgattatgactgtttatcattttgttggaataaaagggacaggtatgagcccgcttgctcaaatcctgcatgatacagggtatcaggtgcagggatcggatatcgagaagcagattttcactcaggctgcccttgaaaaaagaaatatcccgatctatccgttcagcgccgataacatcaaacccggcttaacgataatcgccggaaacgcattccctgattctcatccggaaatcgcaaaggcgctcgctgaagggattcctgtcatcagatatcataaatttttagctgaatatatgaaaaaatacacaagtgtcgcggtaacgggcgcacacggcaagacgtccacaacgggcctcttggcacacgtgatgcagcaggcgaagccgacttcgtttcttatcggggacggaacgggcaaaggaaatgaaagcagcgaatactttgtatttgaagcttgcgagtaccgccgtcatttcttaagctatcagcctgattatgcgattatgacgaatattgattttgaccaccctgattatttcgccaacattgacgatgtgtttgatgctttccaaaacatggcgcttcaagttaacaaaggcatcattgcctgcggtgatgacgagtacctgccgaaaattcacgccaatgtgcctgtcgtgtattacggcacgggagaagaaaatgattttcaagcgagaaacatcgtgaaaaatacggaaggcacgacatttgacgtctttgtccgcaatacgttttacgatacgttctacatcccggcatacgggcatcacaatgtcctcaattccttagcggttattgcgctctgccactatgaagagatagacgtgaacatgattaagcgcggacttgaatcattcggcggcgtcaaacgcagattcaatgaaaaagtgatcggcagccaggtactgatcgacgactacgcccaccatccgactgaaatcaaagtcacgattgaggcggcgcgccaaaaatatcccgaacgtgaaattatcgcggtatttcagccgcatacgtttacacggacgcaatcattccttgatgaattcgcagaaagtttaagcgcggccgatcgcgtgtatctgtgtgacattttcggctcagcccgcgagaacgtcggcaagctcacgatcacggatcttcaggaaaaaatcgataacgcagaactcattgaagaaaatgacacatccgtgttaaaagcgcatgaaggcgcagtgctgatcttcatgggcgccggagacattcaaaaatatatgagagcctatgaaaacgtcatagcgtaacgaaaaagcagtggggctctcactgcttttttgcgcgtgctgcaaagggatttaccgagaaacggagaaatagtatacatacagatctttcatatatgtttatcattttaagaattgggtatataccactatatcctgcattaaggaggtattagatgatcatcattctttacttaagtgtcgcactcattgccgttgcatttctcatcctcgtcatctatctgtccaaaacattaaagtccgtgcagatgactttaacaaacgttgcctcgactttagacggccttgaagggcagatgaaaggtattaccgcagagacaaccgagctgttacataagacaaaccgtctcgcggaagacattcaggaaaaatcagagaaattaaatacggttgtccatgctgtccaggaagtgggaacttccgtccagcagtttaatacatccataaagcaggcagcaggttccgttacggcctctgtaagagagaatcaggataagatcagtcaggttgtcacctggagccaggccgctatggaaatatgggacaagtggaagcaaaagaaaaaaacatcgctttaatcataagaaaaatccactaaggaggaatcataatgagcaaagatggaatcaatagtaaggattttttaatcggaacgctgatcgggggaattatcggcgcgacaacggcgttgtttctggcgcctaaatcaggtaaggagctgcgcgacgatctcggcagtcaggcttctgcgttaaaggataagacggacagaatgacggccgacgcgaaagaaaaaggctctcaatatgtcagcatcgccaaagacaaaacatctaatatcacccagctggtagctgatcagtcaggccagattatgaataaagtgaaggatttaaaagaccgttctaagagcacactaaccgagaaagccgaagagacgagaagcgaaatgcaggacacggcccaaagcatcaaggccgaagcggaagacgccggggaaaaagccggtcaggcaaatcgctgatcttcaataaggagagataaccgacatgacaaaacagctgatatcgtctgaagaagagttcaaaaatgccgctgagaaagaaaacacgctcgtgtttttgaaacacagcacaacctgcccgatcagccaagccgcctttcaggagtttgacgcctttgcatcggcgcattcggaagtgccttcttattacctgcaggtgcaggacagccggccgctttcaaactatatcgccgagacatacggcgtgaaacatgaaagcccgcaagtattcgtcattgcaaacggcgaagtgaaatggcacgcgtctcattcacaaatcacaaaaaacgcaatagagcagcacctttcataattgctggccgccggttgataccggcggttttttttttgaaaaaaactattgatcatttcagccggatcatgtaggatatcaatatatactgcttcaacgcataaaagcttaaaagcgtttttgtgataaagccgaatgtgaaaaaatttattatttcatattcctattttcgcataactgtagtaagatgcatgttaaccattaaaataaaacatagcatagaagggatgaaaaagatgagcaacaaggaattagagagcctaagacagcaggcagacgcactaaacttagaaatccttaaattaatcaatgaacgcggagccgttgtaaaagaaatcggtaaagcaaaggaagcacagggtgtcaaccgatttgaccctgtcagagagcgtacaatgcttaaccgcataattgaaagcaatgacggcccatttgaaaactcaacgatccagcatattttcaaagaaattttcaaagccggacttgaacttcaagaagaggatcacagcaaagcgttgctcgtctcccggaagaaaaaagcagaagatacgatcgttgatattaaaggtgaaaaaatcggtgacggcgatcagagattcatcgtcggaccttgtgccgtcgaaagctatgagcaggttgccgaagtcgcggccgcagcgaaaaaacaaggcattaaaatcctgcgcgggggcgcgtttaaaccccgcacaagtccgtatgatttccaaggtctcggcgtagaaggcctgcaaattcttaaacgtgtcgctgatgaatatgacctcgcggtgatcagtgaaatcgtaacgcccgcccacattgagcaagcgattgattacattgacgtcattcagatcggcgcgcggaacatgcaaaactttgaattgctgaaagccgccggttccgttaaaaagccggtattgttaaaacgcggtcttgctgcaacaatttcagagttcatcaatgcagctgaatacatcatgtcacaaggaaacgaccaaatcattctttgtgagcgcggtatcagaacgtacgaaacggcaacgagaaacacactcgacatttctgccgtgccgattttgaaacaggaaactcacttgccggtgtttgttgacgtcacacattcaacaggccgccgcgatctcctgcttccgacagcaaaagcggcgcttgcgatcggcgctgacggcgtgatggccgaagttcaccctgatccttccgttgccctttcagactctgcgcagcagatggatatacctgaattcgagaaatggctgaacgaattaaagccaatgctgaaagtaaaagcataatacaacgttccgctctttaaaggccgccacgcgcggcttttttttcgtatcttcattttatttaattataaaatgaaagtgaacgttttcatcactgggaaaaacgtgtataatttcatgagagatatttaaatttgatgaataatgaaaaataatgtacactactgacttacgcttacaatcataaacgacagaatgcgaaatcgtacgacatttctttacataaagtgtttatgctatagataaggataagtgtatccagtaaaaggagtggtttcagtgagcaacattacgatatacgatgtggccagagaagcaaatgtcagtatggcgactgtttcccgcgtcgtgaacggcaacccgaatgtaaaaccgacgaccagaaaaaaagtattggaagccattgatcggctcggctatcgcccgaatgcggtggcaagagggcttgcaagcaaaaaaacgactacggtcggcgtcatcatccctgatatctcaagcattttctactctgaacttgcgcgtggaattgaagatatcgcgacgatgtacaaatataatattattttaagcaactcggaccaaaatcttgagaaagaactgcatctgttaaatacgatgcttggcaaacaagtggacggtatcgtatttatgggcggcaacattacggacgagcatgtcgaagaatttaagcgctctcctgtgccgatcgtcttggcggcatcagtggaagaacagggcgagacgccttctgtcgccattgattatgaacaggcgatttatgatgccgttaagcttttcattgataaagggcatcgcgatattgcactcgtctccggaccgatgcaagagccgatcaaccgttcgaaaaaactgcaagggtacaaacgggcgcttgaagaagcggcgattccgtttaacgagcaattcgtagcggaaggcgattacacctatgattccggtatggaggcgcttcaaagcttgatgggccttgaccggaaaccgacggcgattctttctgcgacggatgaaatggccctcggcattatccatgcggcccaagatcaaggtctttcgattcctgatgatcttgatattatcggttttgacaatacgagattgagcctgatggtccgccctcagctttcaacagtcgtgcagcctacgtacgatatcggcgccgtggcgatgagacttttgacaaaactgatgaacaaagagccggttgaagagcagatcgtcgaattgcctcaccgcatcgaattaagacaatcaaccaagtcataaaaaaacggaaaagcaagcttcactctgaggggtggaatcttgcttttttacttgagtaaggagaagatatgaaacgttttgattatctgacgcccgttggctttatgttaggctgtattattgtcgcaatcggtattctgtcagggacgggactggcgggaatcagttcatttttagatctgacttcttttttaatcgtcacaggcggccttgctgcggcgatctttatcagctttccgccgagggatttaaagaaaaccccttctgtactgaaacaggtattctcccgtcaggatgacaatgtgaaagagcttgtcagagtatttgtcagcctttcggagcaggcgcgcaggcaggggcttctgtctctggatgaccaggcgcgtgagatcaaggatccgtttttaaaaaaagggcttttgcttgcgattgacggctgggacgaggaaacgatccggctggtgatggattctgagatcgccgcgatggaagaaagacacagaaaaggaagacgcgtttttgaaaaagccggtgatttcgcacccgcctggggaatgatcgggacgctcgtcggactcgttctcatgctcaaaaacttaaatgacccgcataccctcggaccgaacatggccgttgcgctattgacgacgctgtacggagcgctgcttgccaacttggtatttatcccaatcgcggcaaagcttgaagaaaaaacggaaagtgaaattttcatcaaacaggtcatgatcgaaggggttgtcggcatccaatcgggcaaaaatccccgcaacctcgaaagtcagctcgtcgtcttcagctcaagagaagactggcgtaaaggacagcctgcgaacaagaaaaagggcgctgtccatgaagcttagaaaagagcgttttgaaagaagaaacaaaccggaacattccggcggttcaccgagatggatggtgacgttcgctgacttgatcacgctcattctcgtgttctttatattgcttttttcgatgtcgcaaatagacgcggaaaaatttcaatctgccgtttcatcgattcatacaaaaggcagcgggggtgaactggcgtcatcagacaaagcaaacgaaaataaagaacaggatttgctgttacaaaacgtgaagacatacataaaagcgcatcatttgagttcgaaattgacggcgaagcgcgatgagcgcggagtggttctggtgctgcaggaggccgttctgtttcagacgggaaaagcggatgtgctgaaaaacgccgagccggttctgcatcagatcgcggtgcttttaaaaacaattccgaatgacatacaggtagaaggccatacggacagccgccggatttccacctatcaatttccgtcaaattgggagctgtcgtctgcaagagcggcgagtgtgatccggtattttaccgcgaatgaagacttttccgccaaacggtttatctctgccgggtatgcggatacgaaacctgtgaaggacaacaaaagtcccggacatatgaaagaaaaccgccgtgtagaaattgtgatcaaaaaaacgacctcctcataaggtcgttttttatttagttttataccgctgctcagaccggatggcaaaaagtgctttttccacggtttgggcatttttttctgaaatttcttctttgcggggaatcggaggatataattgttcaggatcactccaaaaagcgggcaacgtgcagggggagtgcttctgccatttatcaatccatttctgcggtatgcgctccccgggatcaatccctttcatctcaagccaaatgcggctccacgctctcgggacgactctccaaatatcgtatccgccgccgccgaccgcgatccatctgccgctgcaatattgatgggctaatgaatgagcaagccgcgggatctcctgataaatggagattgtattggacaggtgtgtcaatgggtcgtaataatgggcgtccgcaccgttttgggtaagaatcacatccggcttgaaaaaagccgcgatttctgaggcggccgtattgtaagcgtgaagaaaggaatcgtcctctgtgaaagcgtccagcggaatgttaaaagaatagccgtagccttgcccgcttcctttttccagtacttgtcccgtcccgggaaataaataacgcccggtctcgtgaaaagaaacagtgcagacatcagacctgtcgtaaaacgtaaattgaacgccgtcgccgtgatgagcgtctgtatcaatgtataacacttttgccccgtagttcttctggatgtattggatggccacggcgctgtcattatagatacaaaagcctgaggccctgccgcggaagccgtggtgaaggccgcctcctaaattgcaggcgtggctagcttgtcccgtcatgacataatcagccgccgttaaggtgccgcccaccagaagtgacgcggcttcatgcatgccggcaaaaacgggggtgtcttccgttccgagaccgtagctttctccttctgcggcagggagccggcccgcacccgctagttccaccgcctgtatataatcctccgtatgaacgagagccagctcttctttagcggccgtgcgcggtgtgacgatatctccttcgtcaaacgcatccgccgcctgaagcagatcgtatgttaaaagcacacgacgctgattgaacggatgttcctgatgaaattgatacgtctgataagaaggcgagtaaacaaaaacgctgtctctcatggctgatccctcaaatgtttcggccataagacattgtatccggcttcttgaacggcacggataaaagggagcggattcatcgtcttcacccggaagacgagaatgttcgacccggcggaatcatggggatagacgagcacactcaggatttgcagctgaagatcacggcacatgcagctgagatcagcaaggctttttgtcatatccgtcaccaggatttccacctgtgatcccggctgggccgcgcctgtcaggctgacgaaagtccggagcacgtcggttttcgttaaaatgcccgtcagcttatggtttaccgtaatcggcagacagccgatgccgtgctcataaaaggaagcggatatttcttctacaaagtcaagcggatgagcgcagatgacattccgcttcataatggtctccactttgtttgtcagaaatgcgccgcgttccttttgttcaaagctgccggggccggcctgtttaatgtctctgtctgtgacaataccgatgacgtgcagctcgtcgtcgatgacagggagatggcggatatgatatatcttcattttacggacggctgtttcaatggagtcgtgttttgagacggtgatgacgtcccgtttcatgatttgttctgcaatcatctttttatcccctttgtatgtcagtcaatacataaatcgctgataaaaacgaagcctgtcgaactgttcaattgactcctgactgacgtgcctgccgatgcgggccatcagacaattggccggatgagagctgatttccggttcatccgttgcgaaccagacaagacccccggcattcatcatcttttccatgatctttctgtattcccacacatcttttttcattccttttaaatcccaatgccagtaatattccgtcgtcatgatgatgtaccgttccatctgttcatccatcatgctgactgtcagcaaagtttttccgacagaacagcccctgtagccgggagcgacctcgatcgccccgagttcaaggaggtcttccatatttccgtcagaccaccgttcaagcggatcaggatataaatacgtcacatagccgataatcgtctgtccgtccctggcaataatgatccgaccttcaggaagcccggcgatctcgattaacgctttgtgctgttcatgaggaaggcgaaaggctgtcaggccttcatgaaactcatactgtgctaggtcctctggaggaacgggcccttctactaaaagagggccggctgctgtctgaattgatgaagaatggtacgttttatgatgtttcactgattcaccgcctgtcggttcttaataaaaacacatctcttttaagcataacaaaatataaagcgttttcaatagtgttgtaatttatattttaaaaattgagaaaactgtgaacatctactataattagtctatagataagcaaagggggatgttgcatgaatttgaaagcgttgccggcggaaaaggggaattatcatctgcgaaattatgaggaaacgtaccgcagcttcgattggaaagaggtcgaagcggcattttcctggcatcagacggggaagctgaatgcggcgtacgaagcgattgaccgtcatgccgaatcatttcgaaaaaacaaagtagcgctatattacaaggacgcaaaccgggatgaaaaatacacatttaaagaaatgatggaggaatcgaaccgggcgggaaatgtactgagacggtatggaaacgtggaaaaaggggaccgcgtttttattttcatgccgcgttcgccggagctttactttatcatgctcggcgcaattaaaatcggtgcgatcgccggtcctttatttgaagcgtttatggaaggcgccgtcaaagaccgcctcttgaacagccaggcaaaggttgtcgtgacgacacctgaactggccgaacggattccggcggacagcctgcccgacctcgagcatattttcattgtcggcggcagcaaagaaacgggagataaaatcattcattatgataaagcggctgagggagaaagcacgagacttgatattgaatggatggacagaagagacggctacctgcttcactacacatcaggatctaccggaacgcctaaaggtgtgctccacgttcatgaagccatgattcagcaataccagaccggcaagtgggtgcttgatcttaaagaagacgatatttactggtgcactgcggacccgggctgggtgaccgggacggtgtacgggatatttgcgccgtggctgaacggagcggcgaatgtgatcgtcggcggcagattcagtccggaaaactggtacggcacgattgagaagctcggtgtcagcgtctggtacagcgctccgacggctttcagaatgcttatgggcgccggagatgaaatggcatccagatttgaccttacttcacttcgtcacgtcctgagtgtcggagaacctttgaaccccgaggtcatcaagtggggacataaagtattcggcaagcgcatccacgacacgtggtggatgacagaaacgggcggacagctcatttgcaattatccttgcatggagatcaagccgggttcaatggggaaaccgattccgggagtggaagcggcgatcgttgacaatcagggaaatgagcttccgccgtaccgaatgggaaatctcgccattaaaaagggctggccgtcgatgatggattccatttggaacaacaaagagaaatatgattcttatttcatgccgggcggctggtatgtttccggagattctgcttatatggatgaagatggttatttctggttccaaggcagagtcgatgatgtcatcatgacatccggcgagcgcgtcggcccgtttgaagtcgaaagcaaacttgttgaacatccggcgattgccgaagccggcgtcatcggaaagccggaccctgtccggggagaaattattaaagcgtttatcgcgctcagagaagggcatgagccatccgatcagctgaaggaggacattcgcctctttgtaaaacaggggcttgccgcgcatgccgcaccgcgggaaattgaattcaaagataaacttccgaaaacacggagcggaaaaatcatgagacgtgtgctaaaggcgtgggagctgaacctgccggcaggcgacctgtccacaatggaagattaaagacggcgttgacatcgtatcttatttatgttaaaaatgagtaagcttcatacgaaaaggttttgattgagacaagtagggtatctgattgttcaagagagctgatggccggtgaaaatcagcacataagatatgccgaatacactcatgaaccgcttttgcgaacaaagccattccaaggctttcagtagtgaaagaacggacacggtccgttatcaaaaagagtgataaaagcttttttatgcttttattagtagggtggtaccgcgattatatcgtcccttcgttttaaacgaaggggcgttttttattttcataaacaaaggagcagacaaaatgactaatttattagaggatttatcattccgcggcttaatccagcaaatgacggatgaagaaggactgaataaacagctgaacgaagaaaaaatccgtttatactcagggtttgacccgacggctgacagcctgcacatcggacaccttctgccgatattgacactgcgccgtttccagcttgcaggccaccatccgattgcgcttgtaggcggcgcgacgggactgatcggcgatccgagcggcaaaaaagcggaacgtacgttaaatactcaggatatcgttgtcgaatggtcgcaaaaaattaaaaatcagctttcccgatttttagatttcgaggccggagaaaaccccgctgtcatagcgaacaactttgattggatcggaaagctgagcattattgaatttctccgtgacgtgggaaagaacttcggaattaactacatgcttgcgaaagatactgtaagctcaagaattgaaaccggaatttcttacacggaattcagctacatgatcctgcaatcctacgattttctgaatctgtacagagaaaagaactgcaaactccaaatcggaggcagtgaccagtggggcaacatcacggccggtcttgaactgatcagaaaatcagaagaagaaggggcgaaagctttcggtcttaccattccgctcgtcacaaaagctgacggcacgaaattcggcaaaacggaaggcggcgccatttggcttgataaagaaaaaacatcgccgtacgaattctaccagttctggatcaatacagatgaccgtgacgtcgtcaaatacttaaaatactttactttcttatcaaaagaggaaattgaagcttatgctgaaaaaacggagacggctcctgagaaaagagaagcgcagaaacgtctcgctgaagaggtgactgttcttgtacacggccgcgaagcgcttgagcaggccgttcatatctcccaggcgctgttcagcggcaatattaaagagctttccgctcaagacgtcaaggtaggatttaaagatgtaccttcgtttgaaaaagaccgctctgaagaactgtctttagtagacgtgcttgtggaatctaaattgtcgccttcaaaacggcaggcccgcgaagacattcaaaacggagctgtttacattaacggcgagcgccagacggacatcgggcatcttctgactgcggaagaccgcattgaagatcaatttaccgtactgcgccgcggaaagaaaaaatacttcctgatcacgtactgaaaataaaaagcagtccggccgctcaatgcggcaggctgcttttttatgttttgtgaatactgcacggggaaatgagtacagtacatagtataagcaaaacagggaaggggtgctgcgccgtgaatttcatgtttaccatcgcaaaagaaagattgcagcgggatcattgggaacagcagcaaagcataaacgccgaagccaaagccgaggaatcagagacggaagaagaaaatccgacatcataaagggaaagcctccattctgcggaatggaggcttttgattgtcaccatatcagcctgacggcggccatcagcacgactcctgtgatgaccgtgatggataagctttttgtccgcatcgcgcaaagcaatgtcgggatgagaacgatcattgctttccaatcaaaggtcaaagcgctgtttgttttcacaatcatgctttccgttaccagagccgtcaaaatgcaaagcggaataaaggagagccattttaaagccaactcaggcatctgaatgttccggacaaatataaacggaacaatgcgcggcacaagtgtaacaatcatgcagccgagtataatccagatcatttgtgtgctgatgctcatttgtccgtcaccaccccgatcgttgccacaatcacggttgagacgatgaccgcgatgtgtgacgggacgaaatacgataacaagaccataaaaatgatcatatagagaattaaggagaggctgtgcttcagcttttccgaagcggacgattgcaattgcagcacaagcagcgccgcaaacatagcgggcaaagcaaagtccaggccgagcgcgtaaggatcagatatccattgtccgagaagcccgcccatcacgcaggaaataacccagcacatgtaagcggttatattgaggccgttcatccacttatcgtataacctgccgttctgagccgctttgttcaccgctactccgaaagattcgtcagtaagcaaagccccgaagccgatatttttcgccaaagagtatttcgtgaaatacggcgcgatggtcaggctcagcagaaggtgccgcagattgacgataaacgtcgttaaaataatggcggaaatcggactcccggaaacaaggagcgagcaaataataaattgggcggcgccggcatagacacacaaagataacaaacaaatttcaagaatgcttagatgagaggcaacgccaacgatgccgaaagcaaaaccgatgctcatatagcccagcagcgtaggcacacaatcccgcaccccctgtaaaaacgtatcgttcatttcccgggaaacggcggttttttgcacttctgtgttaatcattttttatactcctttcatagagattataatgataacgactaatgaaaaaatcaaagaaaatacggttcacatttatatgaaccgatttccggtgacgacatgaaataacgaatggttttgtttcatcaggccttcaactttctcagccccgacttctttcacaagctccgcgaacatcagatcgtgcctcatatattccatggccacgagaacgagagcgggatcttctgatttaatggcccaggcattcgtctgcggagaaaaattggcgattaagacttctttattatcgcgggcagctatcgttaatcttccgcccatccgtttctccgccacttcaggagacatattatgatttgtcgtatttccgagcttcacttccggagggccgaacacaatcgaaaagacgggcaattgttcggcggcgcgtttgttagcggcttcttgaataaagggaatctgctgttcccagacagacagccacaactcttcctcggctttttcaatcatatccttcatctcattgatgacatgatcattcgtgctgatgcggcggatgacattcatctcctgctcgctttccagtgccaataacttttcctcaaggtagccgaatgagctctcgaaatcgtgccggagccggtcgattaattcctttccggcaagcggagcatatgtaaccggatcagacggcacaatatggacagcgcctttatcaactaatttccccaatacttcatagatcattgagcgggggacgcctgaccttttgctgatttcatatccggtaacaggcgagtgtttcaacaagccgatatatgctttacattcatattgagaaaatccaaacttctgtaattctttcagaacatcctccataaacatcctccgtagtggttattcatgaaactactataatgtaagcggttatatcttgtcaatgggacttgagtgctgaaagaaaggtgcgcctgttttgtcgctttccaacttagtttatggtgagttacatgtatggcttttgtgaaaaacgttgccgtagacccacacgaatgccgtttgatacgataaattcaagaagttaaaaagaggaggatcacggtggaaaacacctctaaaatcgcttttttatcggttataagcaattccctggtcgtcatgctcaaaatagtggtggggatcataaccggatctgtcgcgatactttctgaagccattcattcttttttagatttgatcgccgccttcattgcctttatctccgtcaggatttcaaaaaagccggctgatacagggcatccgtacggtcatggaaaagtcgagaatctgtcggggactatcgagacgattctgatttttgcggcagggatttggatgatatatgaatgcgttcaaaaactggtgaacccggcgccggttcatctgcctgtattgggaattgttgtgatgcttgcgggggctctcattaatttgatcgtttcgaagttcgtaaaaagagaagccgaaaaggttaattccgtggcaatgaaatcaaatgccctgcatttactgactgacgtgtacacatcattaggcgtagcggcaagccttttggtcgttaccgtaacggagtggtacatacttgatcccattataggtatggtgctggcggtgtatatcatatatgaagcgtttaagttaatgaaagaagcattcccgccgctgattgatacccgtttgtcggaagaggaagaaaaaacaattttaaagattattgaaacatttcaacaggaatttattgaaattcacgattttcgtacaagacgctccggcccgcaggagtatattgattttcacctggtcgtagcctctcacgtgacgattaaagacgtgcatgacctgtgtgaccgcattgaaagagatattacgaatgaattcaaacaagcacaggtaatgattcaccccgagccggagagcgagaggaagaaataaatcgatcttaagtttgcgtttgttcccggcaaaatgcctgcaaaaggcccgttcccacgggtctttttgttgtataaatgactatttctcgctcatatgagagataagcttatacacgtgaggggttcatttcatacgttatgttgtaaagaaaaagggaggtgaacagaattgaacgctatttctgttaaagaaattgaacatggagttgccgttgcggaaagagaaggtttaggggagtatttataccaagaaccggtttctaaaaaatgttcgcgccgttcccgcagcagaaaacggacacaccgttctcgcagcagaagacggacgcatcaccggacacaccgttcccgcagcagaagacggacgcatcaccggacacaccgttcccgcagcagaagacggacgcatcaccggacacaccgttcccgcagcaaaagacggacgcatcgccggacacaccgttcccgcagcagacggtctcatcaaaaacgtagccgcaaacgctgttttaaatgctgactgcagactctattacaagtaacggggatctgctataatggcaagagaactgcataaaagatccagtatcatcatctgcggacactgaactgacaacatggcgctgtttgttcgtgtccgttttttatgtcaaaaaagatgccggaggataaaaaggaagggatgacgccgaatgaagctgaatgaggatttttataactctgaaggaaagacagtctctttgccaaacatcagcagcaagcttttgcatatcacggacagcgggcatatcagcgttgacttcatcagcataagcaggctgcggaaggcttcaaaaatcgcgatcttaggtgacagcgtcgcccgggggctgcgtgcggaatacggctttggtgacattctgaaagaccggacaaacgctgaaataaccaatctgtctgtcagcggcgttaatatgagcaacaacggaagcgataacatttatcagcaggcgcttaaaacaaagggacatgatgtcatcattgtccagggaacagatgatgattggtgcaaccacattcccatcggcacagatgaaaaggatatcaccacattttacggaggcttctgccaagtgatccagcagctgcggagcggaaataaaggcgcgagcatcattgtggtgaccccaacgagacaagcaaaaatgtcaaaaggaaaaatcgtccgccgtgatactgataaaaataaactgggcctgaagctggctgactatgtgaaagcccaaaaagaagcctgcacactcctctctgtaccatatgccgatctatttgatactgatctcatcgacccatataatcccgctttccgcagcatgtgcatgtcagaaggtcttcatccgaacgagaaagggcatcaaatcatatttcaggaaatctgccggaattattattactattatgggtaacacagcgctaacagattattttcggctttgcttttctaaaagctcaattattctttgagatgcgtgtttttgcgctctcaaaagcgagacgatattaccgataaaaccgattaaaatgataagcagcaaaatgatcatccacatagcgaacctcctgtcgggttttaaaacattctctttttattttacttatgatggatgggccggagaatagtctaacggatggtgttttttgagagccggtgaaagtccataaaaaaagcacagactgaacgggtctgtgcttttttctcttatttcagcaggttcaatgattcacgattaaaggcttccaaatcgtcaggtgttctgctcgttacgatgttatggctcacgacgacttcttcatctttataatgtgcgccggcattgattaagtctttgcggatgctgcggaatcccgtgatatcttttcctttaagaaggtcggtatcaatcagcagctgcgggccgtggcagatcgcgaaaacgggtttctgattttccacgaatgctttagtgaattcacccgggcggtcatctccgcgcagaagatccggtgaaaagcctccgggaatcaataacgcatcgaattccttggcgtctgcgtctgagatcgcttgatcgatctttactttctcaccgtgcttgcccgtcacttctttcccagcttccaaatctattgtcaccacactgtggcccgcttctttaaatgcttccgccgggcttgtatattcaatatcctcaaattgatctgtcatcagaactgcgatttttttgctcatacatcatgcctcctgtgaatttgtatatgacaagaatatcaggcagattcccgcctcacaacgtatttgcttatgaaaaaagacccctctgaaaaagaggagccaaaaggtacggaggtctgcttaaacttacgtgtttaacctgagataaggcaagaaatcgaaccaattactttttgcgtctttttttctgctttttacacccgcatttccccggatcgcccggatcaatgacttcgtgaattgtttcttccttataaacgtggcggggaacataacggatatgctctctgttaatgtgtttgatgggatggacgtaaaccacttctttgtcagtatacttgtcagtcacaatatacttagggtcacagtaatacactttcgattttttacccattcatctcacctcccgtactttattaaatgctgacaaggaggattttgcatcggacaagtacaccatggcaagtccacaatttttcagctgcaatttcgtttttctgatttttcctgaatccgcctcaaattggaacggctaaccctttttgagcggggaaatctataaaaaagaattcaaaaacgattcttttctcaggtcaatcgagatgcatacatctttagggggatttcagaatgctcgatgaaaaaacgattgaaatcattaaaagcacagtgccggtcttagaagagcatggtgaagaaatcacaggccgattttatgacctgctgtttcagcatcaccctgagctgctgaatatctttaatcagacgaatcaaaagaaaaaaacacagcgtacggccttgtcgaatgctgtgattgcagccgcagccaatattgaccggctggaaaacatcgttcccgtcgtcaaacaaatcagccataaacaccggagtatcggtgttaaacccgagcattacccaatcgttggaaagtacttgttaatcgcgataaaggatgtgctaaaagacggggctgctcctgaggtcattcaggcatgggaaaaagcatacggcgtcattgcagacgcttttatcggaattgagaaggacatgtatgaacaagcgaaaacgcaaaaaggcggctggaaagactataaggcgtttaaaattgataaaaaggtaaaagaaagcaaggagataacgtcgttttatttaaaaccggaagacggacaagttctccccgagttcaaagcgggacagtatatcagtgtaaaagtatacattccggacacgggttatacgcatatccgccagtacagtttgtcggatgtatccggtaaggattattacaggatttccgtgaaaaaagacggaattgtttcttcatatctgcatgaccaattacacgaaaaggattcaattgagatcagcgctccggccggggatttcgtattagaccttgattccaaaaagaatctggttctcatcagtgccggtgtcggaattaccccgatgatcagcatgttaaagacggttgccaaaacccagccgcagcgaaacgttctctttatccatgcggcaaggagcggagagtatcatgcgttgcggcatgaagctgaagaagccgcggaacactcatccgttgacaccctctttatttacagcgagccgtccgaacaagaccgttcagaaaacattcgttttcgggaaggccggattgacaaacagctgttagaagaagtgatgacagataaagatgctgatttttacctgtgcggatcaccgtcattcattaaagaaatgaaaaagctgatttctgaattcaatacaccgccggaatccattcactatgaattatttgaaccgcagctgagtatggtgtgattgaagaaggaaggacgatgattttaatgtatgaagcatccggactgggtgctttttttattctcttgcaaggaagggttgctgaggaatcactctgtagaggaaaaccactttttgtctcaactcgcttaattatcgaatgaaataagtgccgcatgttaaaaacatatggcccgcgagtttattgctcacttatcctgctgctcggatttttggtgtgtgagaaaaaaacggtacggttgcataatccggaagagacgctgaccttttacttgtaaaagaagtttaaagacaggatgaacgcttatttgctagtgtacgagcggcaaaagcaaaaagaggaatcggtattttaaaattaaaaataacaactgatagaaatgaaagtttcaggatacaatgggatttatatattcgggttttgtgatagcagtatagggaggggaataatagagtgagtaacttttttgaggaatcggtacagggaggggttgtatctatgcttactgatattaaacaaaaggtttggggatgctcttttatctgagaatcgatttgagatgaagcggggatgccgaggggatcagagggcgaacgtcaggcagaattacgccaagtggaccgccgagaaaaatggctctggaaatgtgaatctattgttgattttcttgagtgagctactgaagaaatagttgacgagaaacaccggactgtctttgtagtagacggggtgaaatatcgtgaaatcgctctgcattctggcgtttcccgcgaaacggtcagacgcatcaaagagaagattttttgccaaatatgtaatttttattgttgaaacagataaaatccgcagtgtagactggaaggcaaaatatttctgcgtccccatcgattcaaatagggattacaataatgtgaagagttatttataaacagaaattgataaataatataagatcagctgacaaacttaatgaggatcaaactagtgctcacttatttataaattaaacatattataatgatatattaatcattaagggagatgagcagctgatgggttatgatcagcatagaagatgccctaaatgtaaacaaaaactaccgaaaccaaactgctgtaagtgctgtcccatctgttatacaaaagttattgtaggacaacgaggattacgaggggtgcgagggattccaggggttacaggaccagccggaccagtcggagccacgggaccagccggaccagccggagcgaccggggccacaggagctatcggtccagccggagccaccggagcaaccggggtaactggagcggcgggagtcacaggagcgaccggggtaactggagcggcgggagccaccggagcgaccggggtaactggagcggcgggagtcactggagtgaccggggccaccggagatatcggtccaaccggaccagccggagccacaggagtgaccggggccaccggagctatcggtccaaccggagtcacaggagcgaccggagccaccggagctatcggtccaaccggagtcacaggagcgaccggagctatcggtccaaccggagtcacaggagccacgggagcagccggagccacgggagcgaccggggtaactggagcggcgggagccacaggagtgaccggggccacaggagatatcggtccaaccggagtcacaggagccacgggagcagccggagccacgggagcagccggagccacgggagcgaccggggtaactggagcggcgggagtcacaggagcgaccggagctatcggtccaaccggagccacgggagcgaccggggtaactggagcgacgggagtcactggagtgaccggagccacaggagatatcggtccaaccggaccagccggagccaccggagccaccggagccacgggagcagccggagctaccggagcgaccggggtaactggagcgacgggagtcactggagtgaccggagccacaggagatatcggtccaaccggaccagccggagccaccggagctaccggagctaccggagccactggagcgaccggggtaactggagcgacgggagtcactggagtgaccggagccacaggagatatcggtccaaccggaccagccggagccaccggagccacgggagcagccggagccaccggagccaccggagcagccggagctaccggagctaccggagccaccggagccactggagcgaccggggtaactggagcgacgggagtcactggagtgaccggagccacaggagatatcggtccaaccggagccaccggagccaccggagcgaccggggtaactggagcggcgggagtcactggagcaaccggagccacaggatctgggctatcagaatatgcttatgtgtacaatctaagtgcagaaacggtagctatagaggctccggtaatttttgactcaactggaatcactactgctggcattacacatgcccctggaacagctcaaattatagtaaccactccaggagattacgaggtcactttttcagtctcgggtgtagagcctaaccaattcactttatttgtaaatggagggccggtgacgaacacagtttacggttcaggagctggtactcaacagaacaatggtcaggccataattactctagcagcaggtgacattcttactcttgtaaatcatacttctgcagcagcagttactcttcaaactttagcagggggaacgcaaacaaacgtaaacgcttctattgttctcaaaaaattaaattagataagtggtttaaatctccatattaaacaagaaatgagaatgacttaaaaaagcttatagagcttaatatacagctttagaaggatgaagaaatttaaaatataagcaaactcatctaatttttttatataaggtattatggtaataggtaataaacaggcaggcgctttcccgcaggggagggtgctttaaatttaaggacaaaagcctccaactgttaagcgagtcaacacagtaggaggcttttctcttatgggtggtacagcagcagtattctcttacaaatcaaatattcccagaaagttatggcagtattcgtctctcgagtaatgaaaaaagttttatgttctctgtaaactgcgtccggtaaatctcgggataaacgattggcggttaacgactgagtacgggggcagtttagaaagaatatgattggagggattacataaaataattagtcaagccttagaggaattaggaaagaatgtgaggtgtgcggctgaaagggtgccaaatctcaaccctgttattatccataaaaaagacatggcagcgcaactacaggaattcagttcggatttaggcttgtcagcagatctccatcattgcctagataaaaaggtaaagaacttattaacggcgtatatggctcacaaacggcataggcaatccatgactcctgacggcatttagggttaaaacaaaagcaaagcgcgaatctctactaaacagttactttaggacttctcaaaaaggaactcctattaaagggagcagggttaattttcaaattgtttaaataaaagtaaaaatatagcatgatagaccagaaaacaaatgaaggaggatttgtatgaggttgttaaaaaactcaatctgtttacttgtcgcaactctattgattgctattggattttcgccgcaaacgaaagcaacacaagaggactcgtttggattagcaaaaccagtaacctttgaagaaaaagaaactttaacagtagataagaatggagtggctaagagcaataatgatggccaggcttccatcattaaggaggcacgacaacttgccaaacaggatagccacaatgaaataacctataagaaccccttagccaaagaagaaaacaacattgttaatgtgccagacgttgagaaaaaagaagaaaagcgcacactaaagcagctagcttagttacgatgtcctacacaacaatatatgaccccaacaaaaaatccacacaaccacaattaaaatagcaagcatagttggcgaaaagcctatagtcattgaagccagaaacgatttatatgaaagtaacacttatagcggaaaatatggaatggtttttctccataacagagaatttttaggaaaagacattaaagtaggtaaatcatattcaaagtcgtattatcctaaaaagacaaagttgatccaaagtggaattggagttgattcgatattcaccatgtgcttccgctaaagtatgggggaaaaaatactttaataatttgtatcctctccctcgtgatatgcaccaaaatctattaaatccttggtgggataaatattaataagtaagaggtggctcaatggcagtttttgttgaaaaaacgctccaaggtctaaaagaattaattgatgaaaaaggccgcttaaaaattttagggaatgaaggaactcttttagagacagaatgtactttctctaaaggtgcaacagatctggagattgagagttttgagaagaaaataaaagtctcacttcctgaagattataaaacctttttaaaattgcataacggagccagaatatttgatttgttgatttacggtgagaatgtgggtgggggattgcatattcttaatttagaagagattgaaaagtatatgcaaaatggttttttagagcctcagtttattcccgtcgcacatctgttagacggatgttatttgttaattgacaaaaccaaaatgtccacagatccaaactatttatggttccgcggatttattgagtatgaaccaatgcaacttaattttgagatatttttagataggtatatcatgtctcaaggagcagatttttgggagtggaatatctatactgctgaaaattattataggactcaccagggtgatgaggattaacctttcctacagttgggttggttcatttttactattagacttcgatttgaacttttaaaaataggtttaatttaggagacgaaccgattaattggtgtatagaggatttataaaaagcgcagatactctgcgcttttttatttaagtattttccgaatcattcgcagcccgtttttggaagaaggataacggaaagcgaagtcgaagcggttcgtttgtttgacgacgctttttttgtgcgtaaacgtgttaaagctgtcaaatccgtgatagctcccaatgccgctttccccgacgccgccgaatggcaaatacggcgtcgcaacatgcattaacgtatcattgatacagcccccgccaaacgacagattctctaaaacagcgcgctcagtttctttgtttgtggtgaagagatacagggcgagcggctttgggcgcgattggactttctcgatgacttcatcgatatcgccgtatgtaaacagcggaagaatcggcccgaaaatctcctcctgcatcactggagagtcatccctcacttgatctagaatcgtcggcgctattttgtggtgatcaggattaaattgtccgcctgtaagcgggacgccatcattcagaaagctgagcagccgctgatagtggcgttcactgacgattttgccgtactgcggattttgttcaggctgagggccgtaaaattcgctgatcgcacgcttcatttcttctgtgagcttcgttttgatatcttggtggacaaataaataatccggtgcgatgcaggtttgccctgcatttgtaaatttcccgaagacgatgcgtttggcggcaagctgtatatcagcatccttatggacaatgcagggacttttgccgccgagctccaaggtaacgggaattaattgtttggcggcggcctccatgacgatttttcccacggcaacgcttccagtgaagaaaatatagtcaaagggctgctgtaataacacagtgctgacgtcgggcccgccttctgccatagcgacatagtcactcggaaaaacgctgctgatgagtttggaaagaacagcggaaaccgccggcgtatattctgacggtttgagaacgaccgtgtttcccgctgcaatggctccaatcaacggagaaagcgccagctgcaagggatagttccagggcgcaatcaccaaaacggttccatatggctcagggataatgatgcttttcgagcctaggtgagtcagaggcgttttgactcgtttcggtttgatccattttcccagccgcttcatcacaaaactgatttcctccagtacaattccgatttctgtcgtgtacgactcctgttcggatttgtggagatcctgatagagagcggctgttatatcggcttcttgtgttttgatggcttgtttcagcttttgcagcatgttcagtctcgattctagctgtctcgtatgccccgccgcaaaataggctttgtgcttgctgacgatagaggggatgctgttcattcagtcgctccttttttgtaaggtatgatgattcattatgtaaaaaatcgcttctgcttgtcaaatgggattttctaatgtacatgtagctgaaaagccagttggcacataaaaaaagcccctgtccggggctttttttaataaagagagggagcagggagcatctgtccattattctgacagcccaaaagaaaaaccccggaaacattgtcatcacaacatgtccggggtttaatccaatgctctttaaagagcgttttacttaacgggagtagaactcaacgataagcgcttcgttaatttccggagcaagctcagagcgctctggaagacgagtgaatgtaccttcaagcttttcagcgtcgaaagtaaggtactcaggaacgaagttgtttacttctacagattctttgatgatagaaaggtttcttgatttttcgcgaacaccgattgtttgaccaggttttacttggtaagacggaatgtcaacgcggcttccgtcaacaaggatgtgaccgtggttaactaattggcgagcttgacggcgagtgcgtgcaagaccgagcttgtacacaacgttatcaagacgtgcatctaaaagaatcatgaagttttcgccgtgtttaccagtcatttttgcagctttgtcaaacaatgtgcggaattgacgttcgtttacaccgtacatgtgacgaagtttttgcttttcttgcaattgcaaaccgtattctgatagttttttacgctgtcccggaccgtggggacctggtgcgtaagggcgtttttctaattctttacctgtaccgctaagagagattcctaaacggcgagacagtttccaagatggacctgtatagcgagccataatgtgactcctcctttggttttattttgtggaaaataaaaaccgtctgttcgatccgaccgtgcacattttgttttcatgtatcctcgctccagcagcagagagttacacgatacaccttacagctaaggaacaaaatgcaaacacagaagctgaacaaaaaggctgcaatatttcacacaaagaacattatatgatttttccccgccgccgtcaaccatttctccatgaagagtgccggtttatgatataatgtacaaaaatgagtagtacatgtttaggtgataaaaatgaaaaaacaaacaattgatgaagtgacggcctttcatcagaaaatgctttcttttttcttaacgaaatctgaatccgtctcattatccgactcgctgttatggctggcctcagctctagaatcctgctttacatctctttcattgaccctttcaccggcagaatcaacacgtttcaccataaaaacagaagatgaaccgcattatgctccgctgaaagagagtgacggccgttttatgatcaggaatcagacgtccggcagatccttttatctgtgctcggaaggcgggctgccgatcccggaatcattgcctgagatcgttactcagtttattaatcaatctgtgagacaaagcgggctgtttgacaaaacgaagcatcagcggaaaattcacagaatgacagaaatgttccattcgcttttggaccaaaatgaggttttggaaaaactgcaggcaagtttgagtacggctttccggtctttccgcttttcactgtttatcacgcaggatcaggatacggacaggcagcttcccgcaaaagaattacatatggacggaaaagatgccgatccgtctgccctgaaggtttatttatcggggagactgctcagaaaaggcaggtcatctgcttatctgccgatcaaaggccagcaggggacttacggggttctgaagacggaggggctgcaggatgccgttctttcgtgcagtactctcagtgaaatgctgctgcttgcgggcgcagcgggaaaagcatttgaaaatgcgcagctctatgagcaatcgaaaaaaagcattgcgaatctggagctcattaatgaaacatcgcgccagctgaatcagcgcctcagactcactgatacgatgcgggagctcgccgccattatgacccaatcgtttcatgcggaagaagtggctttttttcatattgatcattttgagacgcaaaatctgcttccgggacataccgctttttttaagacagaacgtgcgaacccctatatcagcattgtgaaagaaaagctgttcgagggagaaaagggcgtgtttatcggcagcggaaagactgtattcggcgaaaacggtttcggctcgctgatggcggtgccgatgatcgaaaatgacaccgtcttcgggttcgcgattttattgaaaaaggatttgtatgcttttacgtttgaaatgtataagctttttcaagcgctcattcaccatgcgacattggcggtcacgaactccatgctgcgcgacaggcttgagcatcttgttcagacagaccagctgacggagctgtattcaagaacctatttggatgagaaaattcaatacagcatgaaaattcataaacggggtgtattcatcctcgttgatatcgataatttcaaaaatattaatgatacatacggtcatcaaacgggagattcgatcctgattcaggtggcctccgttatgaagaaccatattcgtgagcatgatgtcgctgcgaggtgggggggcgaggagctggctgtctatctgccgaatatcaacgtgtcatccggagaacgcatcgctaaaaggctggttcgcgccatccgggaaaataccgagccgcgcgtgacgatttcctgcggcgtttcctgctggtcaaagaccggcccgatgccgttgaaattgctcgttcagcaagcggatgaggcgctttatatcgccaaacggaacggcaaaaaccggctgatcatccatcaaaacagcaagacgacataaaaaaggagccggcctgccggccgggctctttctttatcctaatcgtttttcaagcgtttcaacaaactttgctaaataggtttcgtccgtttcatcaaaacggtttttcacagggctgtcaatgtccagcacaccgatcacttcaccgtttacgcggatcgggaggacgatttctgactgggaagccgcgtcacaggcgatatgtcccgggaacgcattcacatcggcaatccgctgcacgtcgccattagagtaggcagtgccgcatacgcctctgccgaacggaatgcgcacacaggcaggaagtccttgaaacggtccgagcacgagctcgccctctttagcgaagtaaaaccccgcccagttgacttcatgtaatgaatggtataaaagcgctgacgcattcgcgtaatttgcgatcgcatccgtttcatcttctgtcatggcttcgagctgtttaagcagaagctgataacttttttctttatctccggattgtttttcgacatgaaacatggaaaaccctcactttttctataatatcaaacaaagttccggccgttctgccggcatttgtcgagaagttcttacaggaacggcgcctttctgcttgaattgttacacataaaggggtgagccgtatgaaagtaagcaccaaagacaaaattattaacgccgctgtccagctgtttaaccaaaaaggttattccggcacgtccgtccgtgaaatcgcaaagtcagctgatgtaaatgttgcgcacatctcctactattttaaagggaaaggcggattaatggaacatttagtttccgagttttacgaaggctatactgaagcgctggaaaaagccgccgtcagtatgaacggtgaagacgcgcaggaacgcatcctgcgggtgattttcgatattttatcctatcagcacgataaccgtcaattaacgcggtttgtataccgggaagtgacgattgattccgtgctgatcagggaaattatgtctacttacttaatgaaagaaaaatatattttccagctggtgattgaagaagggcagtcacgtcacagacggctgacactgcccgtcccgcattttattctgcaattgaaatccctcttgatgatgccgtatcttcagcctcaatatattacagaggtgctctatatgcagcctcatgaaccgtacttttataaaaggtattttgaagaggtgaagatctggatcgaaagcgtgttccgacggcctgatgcggcgcttatgaagtaatgatgcttttgtacgtttcgtaggaactgccgacatcttccgcttgatgggcgtccgacccgaatatgagcgggatttttttttgcttcgccgtcttagccatccaatcctccatgtatacttccccggcaaacttctttctgagcccggatgtattcacatccagctccattccgtgttctttcacggcgtcaagacagcgggccgcaagctctcttatttgaggtgacatgctgtaagggaaaaggcgcgcgaattttttgacgagcgtgatatggccgacccgttttggcttaaagggaccgagcggtgttacaatggaagaatacacagtttcatagtattgttcatatacggcttcaacgcttccgaagcggtcggcaagctgctgaaaggcgtgctcgtcaaaatcgaggcatatataagacggaccggttttcaaaaaatgaacggataaaatgccgtcatccagtgaggggccgtacgtgttcagaaacgccgcagtttcctcttcataccctgtgataaaatcggtttctagcccagtcagaatgctgatttgtccatcgtattcctttttcagctgtgacagccgctccaaataaacctccatctgtctgagatccatcgcgctgtcctgaagcggtacgggatcttgaaatgacggaggaaggggggcgtgctctgtaaatgtgatcgagtcaaagcctctttccagggccttttcgacatattgtttcagcgcatccttcgagccgtgagggcaaaaaggggtgtggatatgagcgtctcgtttttccatttgtgtcactccattaaaaaattgcagaatcctgccgaaattatgcaaaaagtttttgatttctggtcaaaaaatgttggttacatggtatcataataacaatgaaaacgacagattttctcaatacatatattgaaatctttctgaatacataaaacaccctgacagattaagagaacaacaagggggctcattatggagttagtcatcggattattggttatactgctcgcgctctttgcggcgggctactttttcaggaaaaaaatttatacggaaattgaccggctggagtcatggaagattgaaattttaaaccgttcgatagtggaagaaatgtccaagatcaaacatctgaaaatgaccggagagacggaagagttctttgaaagatggcgcgaagagtgggatgaaattgtcacagcccatctgccgaaagtagaagagctcctttatgatgccgaagagaacgccgacaaataccggtttaaaaaagcgaatcaggtgcttgtccacatcgacgacctcctcactgcagccgaatcaaatatagaaggcatactgcgtgagatcagcgaccttgtgacgagcgaggaaaaaagccgcggagagattgaacaggtgcgtgagcggtattcaaaagcgcggaaaaaccttctggcgtacagccatctctacggagagctttacaacagcctggagacggatctcgacgaaatctggagcggcataaaagagttcgaagaagagacggaaagcggcaattacatcaaagcgagaaaagtgctgcttgaacaggaccacagactggatcagcttcagacatacatagatgacgttccgaaactgcttgcggactgtaaacagaccgtgccgaaccaaattgccaagctgaaagacggctaccgggaaatgacggaaaaaggctacaaattggagcatattcaaatcgaaaaagagctggagaccctcacaaatcaagtgaaacgggccgaaaacgcgcttttggaagaattggatgtcgacgaagcgtccgccattcttcagctgattgatgaaaccattcaatcgatgtatgaacagctggaaggcgaagtggaagcaggacagtccgtcttaagcaaaatgcctgagctgatcatcgcgtatgagaagcttgaggaagaaaaagaccgcacaaaaaccgaaacggagctcgtcaaggaaagctatcagctgacggcgggagaaatcggtagacagcatgccttcgaaaaacagctggaaacgatcggccggctccttgagcaggcgagagaaaagcttgacggtgagcatgtcgcttactctctattgattgaagaagtcgaggccatcgaaaagcagatggaagaggctcagaaagaacatgccgaataccgtgaaaatctgcaggcgctcagaaaagaagaactgcaggcgcgggaaacgctgatgcatcttcggaaaaccatttctgacacggcccgaatgctgcaaaaaagcaacgtgccgggaattcctgaacaagtcaaggacaagctcgagacggcaaatcatcatatagaagaaaccgtcagccaattggaagagctgccgctgaacatggaggaagccgccaaacatctggctgaagccgaaaaggtggttgaggaagtcagtgaagaggcggaagatcttgtgattcaggtgaagctgattgagcggatcatccagtacggcaaccgcttccgaagccagaatcatattttatccgaacagctgaaagaagcggaacggctgttttatgcttaccgctataatgaagcttatgagatggcggcagatgctgttgaaaaagcagctcccggcgccgtgaaaaaaattaaagctgatcaatctgcttcatagacgcataagcaaaaactgcaccctgatggaaatcagaggtgcagttttttagtttctcacggaatataaaaagcgcctgcggctgatatacatcaaaccgcaggcgctgaatgttacgattttgctttatttaattcgatgggcgggctggtaaaaaacgtgataatgcagccgatgatcgctccggcaatgcccggaagcacccagccgattcccatgctgtaaagcggaagatttgcgtttaagaatgaatctaatgatccgagcggaatgccggctgccttcaaaccgtccaggatactgaacagccccgttccgatcaggcaggcgatatagacttcgcgtctttccttaaagattttatcaataaaggaaaggacgataatgacaatcgccagcgggtaaatggctgataaaataggaactgaaaatgcaataatctcagcaagtccgaaatttgaaatcgccagactgaacagcgtgacaatcgtaaccaccattttgtatgataaagctggaatcaattttgaaaaatattcgccgcaagatgtgacaagcccgatgcttgtcgttaaacacgcaacggtgatggcggcgccgagaacgatgtttcccagtgaaccgaacaggtaatcagatgaagctgataaaatctttgcgccttcgccgagcggccccacagcgtccgtgcttgtcgctcccaaataggctaaagataaataaatgaatgtcaaacctgccgctgcaatcagacccgctttaatacaagcggcggcgagcgctttacgctgggtgacgcccctgcttttaacagcgttgacgacaacgacgccgaagacgattgaggcgagcgcatccattgttttatagccttccaaaaatcctttgaacaccggcgttccggaatatgcctgatgtacggcgcccagcccgcccatcggagtgacaatggcttttacgacgatgattaaaataataccgaatttaataggagtcaaaatctttccgactctgtccacgattttggacgggttaagagctaaataatacgtaatagaaaaaaagatcaacgtgaaaacaaataaagataatctttccggaatgccgcttaaaaacggaactgcaccgatttcatatgaaacggttccggttctcggaatcgcgaaaagcggcccgattgataaataaagcacaacggtgaaaatagtcccgaataccggatgagctttatcggcaagccctttcgcgtctttgcccgttaatgcgatggcgataatacccaaaagcggcagaccaacgccggtcagtaagaaaccgcccatcgctttccagacattatgccccgccgcttgcccgagctccggcggatatatcatatttcctgccccgaaaaaaagtgcgaaaagcatgaaaccgataataacggtatctttgacaggtagtgagtgtttcataaaaatcctcctaaatactatgttgaaatattctgtcaattaattgtcagataatataacaaaacgaacattacttattatatggcaatgtacagagaagtcaatactcgatttattgcgaatttatatttacttttgttatggtagcataaatatcatacgatgtaccgttttcattaaaggagtaaaaaaaatgatatatttagacaacagctcaacgaccgagccgtatgaagaggtattggatgtgtacaaacagacgagcagccgttatttcggcaatccttcgtctctgcaccggttaggaactgagacggaacagctccttgaagcggccgctcagcaaataaaaaaaaccttgcgtttaaaaaattatgatattgtatttacatcgggcgcgactgaagcgaataacgctgcgttaaagggagcagcctgggcaaacatgagtaaaggaagacatatcattgcttcggcgattgagcatccttctgtgacggagacgcttgatcagctgacagagctgttcggctttgaagtcacatatcttccggccgatcaaaacggcttcgtttctttgaaagacgtcaaatcggctatcaggccggatacgataatcgtcagcgtcatgcatgtcaataacgaagtcggctccattcagcccgtaaaggaaatcggcgggtttttaaagcagcaccggaatattctgtttcatgttgatcatgtgcagggcattcataaagttcccctgtctatagaagaagcgggcattgacctttgcaccgtttcagggcataagtttcacggcttaaaagggaccggagcgcttatcgtcaaaaaaggaacgcggctcattccgcttataacaggcggctcgcagcaaaaaggcgtccgcgccggaacggaacacacggcaggcgccgtttcccttgcgaaagcgatcaatctttccgcgcgtgacatgaacgagcggctttcttccgtggaggctgccaagaatgcgctcatggaaaggctgagcgggacggacggggtcgtcatcaacacccccgctgaaagcagcgcgccgcatatcattaatttttccgttccgggcgtgaaggcggaagtgctgctgcacatgcttgaggaaaaaggaatatatgtctccacaaccgcggcatgttcggcaagagagcacaaaccgagccgtgttcttctgcaaatgaataaaggcgaacagattgcatcaagcagcataagagtcagcctgaacttcagccatacggctgacatcacggagccgtttatggccgcgctggtgccggctgttcaaaaactaaaaaaaatgatgaggtagcatatgaattacgatcatattttaatccgttttggtgaaatatccacaaaaggaaaaaacagacgcagttttattgaaagattaaaacagaatatccgcctggtattaaaggattataaaaaagtaaaatacttttcaaaccgggaccggatgtcgattactcttaatggagaaaacccggaggaaatttgttccttattaaagaatatattcggcattcaaagctttagtctcgcaattaaatgcgaaagcaagctggaagacattaaaaaaacggctttagccgcgatagaaggcgaatataaaccggggaatacgtttaaggtcgagaccaaacgggcttacaaacagtttgaattagatacgaatgcgatgaacgctgaaatcggcggccatattttgaaaaacacggatggattaaccgtcgatgtgaaacatcccgatattccgcttcggattgaaatcagggaggaagcgacattcctgacgattcgcaacgaaaaaggcgccggaggccttcctgtcggttccgcgggtaaagcgatgctgatgctttccggcggttttgacagtccggtcgccggtttttacgcgatgaaacggggattatcagttgaagccgtacatttcttcagtccgccgtatacgagtgaacgggcaaagcagaaagtcatggatctcgcgggatgcctcgcgaagttcggcggcagtatgacacttcatatcgtgccgtttacaaagacgcaggaactcatccaaaaacaaatcccggagaactatacgatgacggcgacgcggcgtcttatgctgcaaatcgcggacagaatcagagaagaacggaaagcgctcgcgatcattacgggagaaagcctcgggcaggtagcgagccagacgcttgaaagcatgtatgcgatcaatgcggtgacggcaacgccgattttgcgccctttaatcggaatggacaaaacagaaatcatcgaaaaatcaaaagaaatcggcacttatgaaacgagcattcagccgtttgaggactgctgcaccatctttacgccgccaagtccgaaaacacgtccgaaaaaagaaaaaatcgagcacttcgaaagcttcgttgattttgaaccgctgattgcagaggccgctgccggcatcgaaaccatcactgtttactcggagcaggaagctcacgataagtttgccggcctgttttaaaactgtatacaattaccaaagtttttttgaatgaagacatgtgttttatcacattctatactcacaaggaggtgatacacatgtcacaacaatcaaacagcggaaacagcaaccagcttttagtgccaggcgctgctcaagctatcgaccaaatgaagtatgaaatcgcttctgaattcggtgtaaaccttggaccggaaacaacttctcgcgccaatggttctgtcggtggagaaatcacaaaacgtcttgtctcttttgctcagcaaagcatgggcggaagcagccagcagcagttttaatcacaacttcacataatggctaagagagcggggaattccccgctcttttttcatgagtatagatagaaggcgggaagcaatttatgcatatttttattgtaatggcctatgtttatgtataatggggaaagaaagtgaggagttgttcgtgttaaaacgagaagatttaatcgccccaaagaactataaccttgtaaatgaaatcgaaaagttcagccgttccaaagagaagaacgcgcttatttgggaagatcaaacaggcggcaagaaagtctggacgtatgaaaaattgatggaagaaacgaataaaatcggagcccgtctgaaaggtctcggatttgaaaaaggcgataagctgattgtcatggttccgagagtgcttgaagcgtatgccgtttatttagcgatcttaaaagcggggatggtcgtcattccttgctcggaaatgctgcgcgccaaagaccttgaataccggatcaaacacgccgaagtgaaaggcgctatcgtttatccttcatttataaacgcgtttgacgaggtgaataccgaacagctggtgacattgtcaatcggtgaaaatgatgccggctggaaaaacctcctaacgattgaagcggatggagacagttttcaaacagctgatacaacaagagaagacatggcgtttttgtcctatacttcaggcacgaccggccagcctaaaggcgttgtacatacacacggctgggcctttgcccatttaaaaacatcagccggtgcatggctggatatttctgaagacgatacagtgtgggccaccgcggcgcccggctggcagaaatgggtgtggagcccgctgctcgcaattctgggaagcggcgcgacaggagtcatttatcacggcagattcaacgccaagacgtatttagagctgctggagcgccatcaagtaaatgtcttctgctgtaccccgacggaataccgcctgatggcaaaagtggaggagttggacaaatatgatctttctgcccttcacagcgcagtttctgcgggtgagccattaaaccgggaagtcattgacgtattccggaagcatttcggcattaaagtgagagacggatacggccaaacggagagcaccctgttagtcggcgtcctgaaggatatggatattaagccgggaagcatgggcaaaccgacccctggaaatcaagtggagattataaacgataaaggcgaaatatgcgaaacaggcgaaacgggcgatatcgccgtgcatctgagcacaccggccttattcaaggaatattataaagatcccgaaagaacgaaaaagcagattcgcggagattactttcttacaggagaccgcgcgaaaaaagacgaggacggctacttttggtttgagagccgcaatgatgacattatcgtcagctccggatatacaatcgggccttttgaagtagaagacgcgcttgtgaagcatccggaagtgaaagaatgtgccgtcgtggcgagcccggatgaaatcagaggttcaatcgtaaaagcctatgtcgttttacaagacgatgaaaagcgcagtgacgaacttgtcaaagaactgcaaaaccacgtcaaaacgattacggcgccttacaaatatccgagagaaattgaatttgtcgaaagcctgccgaaaacggcgtccgcaaaaatcagacgtgtggagctgagacagcgtgaagaacggctgaaggctgataaaaaagcataatacaggataaagggtgagcggggatgaaagcgatttggcacggcggcaccatctatacaatgctggacaagaatcatgtcactgaagccgtttataccgaagaaggcgtcgtcaggcagacgggcagcttccgggagctccaaggaacatacggttcgcctgatacggaggaaatcgatttacatggggctgtcatgttcccggggtttacggacagtcatatgcatttaatcggacacggggaaaaacagcttcgcctcgatttgtcgcagctgacgtcaaaagaagcgatactgcgggccgcaaaagaagcagagcgtgaattggaagatggcgaatggctgatcggcgaaggctgggatgaaaatctgtttgaacagccggattacgtcacgaagcatgacctagacccgctctttcccgaccgccctgtcctgctgaagcgggtatgccggcacgccgcggcggttaattcggccgcattgcgcgcggcgggaattacaaacgaaacacctgatccaaacggcgggattatcgtccgggacggcaccggtacgacaggcctcctgctggataaagcccaagagcttgtgacacaggccctgccgcccgtctcacttcactatgtcaaacgcgcgcttcaaacggcgattacggactgctggtcaaaaggcctgacaggcgggcattcagaagatctggcatactacggagacgcgtccgttcccgttgccgcgtacgagtcattaaccggcagcggcctttatccttttcgcgcccatctgctcgtacatcacgaagccgtcgacagctggagcgctctggataaatcgaccggaccttatctggaatacggagcgatgaaaatttttgctgacggcgcgctcggaggcagaaccgctctattgaaaaagccttatcatgatgatccgtcagtttccggcgttcaggtgcatgatgacgaaatccttgccgctcttgtttataaagcgagagagaaagggttggagatcgccgtgcacgcgattggcgaccttgcatttgaaaaggtgctggatgttatcgaaagatacccggcaaagcccggacagctagataggctcattcatgcgcaagtattagatgacggattgattgaaagagccgcccggctgccgatcggacttgatcttcagccgcattttgtggccagtgattttccgtgggtgattgacaggctcggagaagagcggatgaaaacggctttcgcctggaaaacactgctgtcaaaagggctgctgtgcgccggaggttcagatgccccgattgagccggccgatccgcttctgggcattcaatcggctgtgctccgtacgagcaagcagcacccggaaggtccggcctattatgaaaaagagtgtctgaccgtgtacgaagccattcagctttacacggagggaagcgcggccatcatccataaagaacatagccgcggacggatcgcccccggctatgatgccgactttaccgtactcagcggtgatccgttcaggacggacccgaaaaagcttcatgaattggaagctgtcaaaaccgtcgtcggcggccgtatcgtatatgaaaaagaggacaggcagtgatgcccgtcctctttttttatgataaaaatgatcgttttactttttcccagaaagagttgtctttcagtttcaccgttttgatttttttatcggatagtctaatctcaacctttttgacattccgcgtgctgagcgcttcattatcaagcccgataatcggatgctcattgccgtcttgcaccacctgcagtgtcagcttccggtctgagcttaaaataaacggagatccgagtgtacggtatgtgttgttgttcaacgacgccagttcggatacctgcatgcaggaaatcaaaggatcaacaacggcgcctgaaacagatttattgtaggcagtgctgcccgtcggggtggaaatgatcatcccgtctcctctgaacgtctcaaaatgaaggtcatcaattaacacatccatcacaaacgttttaataatgcttgaacggatggaaacctcgtttaaacagtgaaaatgattgctgccgtccaccgttacgtgaatgagcgggtattttctgacctcaagctgttccgcggtcatgctggccgccattttttcaggttcatcgctgtgaaaatcacagtacaaatgggctttcccttttttagcgatgccgacatacaggcagtcatcacggaatccggtttttctgacggcttgcagaaatgagccgtcgctgccgatgctggcgataattccggcatcctccggttgagccgcaactgtaaaaccgtgcgattcagcaagctgcttcaaagagctgacttgttcttttgtttcgttgttttgtttgtgaaaaaaataaacattgcggcgaagatcggtcatatccccattcccctttgctgtcatatttacgtttttctcccagcaggtattgtgttaaaatacctgtggcaatagtgtaacatgtttcctgtttatccgttaagggaaagcgcttcatgaaaaaaatgaatctttttttacgggggaacgtacgaatattgacagaaaaggaggagaacaaatgaatgcaaaaagatggattgcgctcgtcatcgcgctcggcattttcggcgtatcagtcattgcaagtgtgaccgtcggggtgctgaagaatatcggggatacagggtctgactttgcatcactgacagatgacacagaggaagtgacgctggataagggcagccccggcagtaaaatcgccgtgcttgaagtggacggcacgattgaggataacggcgggtccgctggcctgctcagctcaggcgggtatgatcacagatcatttttaaaacaggttgagcgtgcgaaagaagacaaaagcgtcaaaggaattgtgctgaaaatcaattcccctggcggaggcgtgtacgaaagcgcggaaatacataaaaaactggaagaactaaagaaagaaaccaagaaaccgatttatgtatccatgggctccatggcggcatcgggaggctactatatttcaacggccgccgataaaatctatgcttcaccggaaacgctcacgggttcactgggcgtcatcatggaaagcgtcaattattccaagctcgccgatgaactcggcatcaagtttgaaaccattaaaagcggcgcgcataaagacatcatgtccccgacccgcgacatgacgaaggaagaaagaaagatcatgcagacaatggtcaacgattcttatgaaggatttgtcaatgtcatttcaaaaggccggcacatgtcaaaagcggatgtgaaaaaaattgccgacggccgtgtttacgacggcagacaagcgaaaaaaaacggcctcgttgatgagctcggtttttacgacgatacgatcagcgcgatgaaaaaggaccataaaaatatgaaaaacgcttcagtcatcacatacgaggaaggattcggattaggctcgctcttttccatgagcgcagcgaaaatgtttaaaagcgaaattgattttctgaatatgaaagaactcatttcgcaatccggttcgccgcggatgatgtatctctatgcaaagtaggggggaagaaagaatggacgcgacttacgaaggctttcacggcaaagaagaggaagccgaacaacagagggcgcccgagcaggcatatgcgggcttttggatcaggttttgggcgtttcttcttgattggctggtggtctggggacttaaccatctcatcgtttcaccgattttcacgctgatgaagctcccggcaacaagcggaatgtttacaatctcagcttattccgtcacaaccctgatcgtctacctcgcctattttgtgttcatgacgaaatggtttcatcagacactcggcaagatggtcttcgggttaaaggtcacttctttgacgcccggaaagccgctgacttggagcaccgtcattttcagagaagcggtggggcgttatatcgataaaatctggattctctatatcgtcattgcgtttacgcccaaaaagcagggcattcatgatctgatcgccgacacaacggtgattcacgaagcgctgtaccgcaaataaaagcagtaaacccggaataaacgtccgggtttattttttttggttttggcgataatgctgctaaggaagtgaagcttatgggatatgccgcagcagctgttattctcattctcattttggcctggctgctcatgaggatgaaaatccacctgactttcgaatatcttcacgataaagataacgacaaactgacgtttaaaatctcggccttatacgggctgatccgtattaaaaaaacgctgcccgtcattaaagtaaacagcgaagacgcgtcaattgatgtcaaacaggacacaaaatcagaaatgaaaggtcagaaaaaagagaagaaaaaaatcacatatgaagatgtcaaacagagcattcacagaatagaaatgattctgcaccaagtctttcagatgcgccaaatcgccgcttcatttcttgcgggagtccgtgttacgaagttcgaatgggtgacggttatcggaataaaggacgccgccgttactggaatcgccgccggcggattgtgggccgtaaagggaggacttacggcgatgctgtatgatcatctgcgtttcatacataaaccggtgtgcgaagtcattccgtcttttcaagtgcctgcatccaagacgcatttgcagtgtatattcttttttcgttttggacatcttataggtgcagctttcaaattgctcaaatacgggcggaacggactttctatcatacgaaagaaacagccggttccggttgcttcaaagaatgattcatcagtttaaggaggagcgcatatggcagaccatcccattcaaggtttaatgaaaaccgctatggaaaatttaaaagaaatgattgacgtgaatacaatcatcggcgatcctgttgaaacgcctgacggcagcgtaatcttaacggtttcaaaggtcggcttcggatttgcggcgggcggaagcgagtttggaggaaagccggctgaaaaaagaaccgatgatgatgaaagaaaagagcagaagctcccgttcggcggcggaagcggcggcggagtatccattacgccgattgcgtttctgattgtcggaacaaacggcgtgcgcatgcttcatttagacgaaaacacccatctgattgataaactgttagactccgcgcctcaaacgattgaacgcatccagcatatgtttaaaaagaatgaaaaaggccggaaccaaaaaagaacggatatcgatttataacagaaaagttaactgccgcccgcagttagctttttttacgatgcggcataacctttgcagtttgcataaaactcgactatgatagagctatacatagataaagggaggaatcagaatggctgaaattacatttaaaggcggagccgtgacgctgatcggacaagaagtgaaaccgggggaccaagctcctgacttcacggttctgacaaacggattagaagagaagacattagcagatatgaaagggaaagtaacgatcatatccgttattccttccattgacacaggcgtatgtgacgcgcagacacgccgcttcaacgaagaagccgcaaaactcggtgatgtgaacgtttatacaatcagcgccgaccttccgtttgcacaagcgcgctggtgcggagcgaacggaattgataaagttgaaacattatcggatcataaagagatgtcatttggtgaagcattcggtgtttatatcaaagaacttcgtcttttggcacgttccgtattcgtccttgatcaggacggaaaagtcgtttacgcggaatacgtaagtgaagcgacaaaccacccgaattatgaaaagcctatcgaagctgcaaaagcgttaatcaagtaaagagagaaaaagagctccgggtgctgccgcggagctcttttcatggcaaggaggaaacagcatgcaacacgaccatgtcggtcagatttatgaacttttagatgaagccgcccaagtgatagcagaaggccttcagatttcttatattgaggggcttgcggaagcgggagaaatgtattttcttgaaaaggccgaccagcttccgcttcaggaaaagcaaaccggcgagcttaacagcctgcttgcgaaagcagacttcagaaaatgggagcatgaatggatccgcaaggcgttccagctcgccattttaaaagggctgaaagataagtcccatccgaacagacagatgacgcctgatacgatcggcattttcatcagttacctcgtgaataaatttacgggcggccgaaaaggcctgacattgctggaccccgcctgcggcaccggaaatcttctgctgaccgcggcaaaccagctttcggacaaagcggcaaaaagcttcggcattgaaatcgacgatgtccttctgaagatcgcttatgctcaggcgaatctgcaggaaaaagaaatggagctgttctgccaggacagtcttcagccgttatttatcgaaccggccgatgcggtcatctgcgatttgccggtcggctactatccgaatgacgaaggcgctgaagcgtttgagctgaaagcggatgaaggccactcttttgctcaccacttatttattgagcagagcgtcaaacatacaaaaccgggcggatacttattttttatgattccgaaccatctgtttgacagcgcgcaaagcgataaactgaagcggttttttgcggaaaaagtgtatatcaacgcccttcttcagctgccggctactatgtttaaagacgaagcgcaggcaaagagcattttaatcttgcagaaaaaaggcgaagacgcaaagccgccgaaacaagcgcttttggcgaatcttccttcttttgcgaaccagcaggcgatgcgggagatgatggcaaaattggatcaatggattcaaaaagaaaaataatggcgaaaaagcagtgtgagatgcaaaatcccgcgctgctttttgctttttaaaatgaatggaaatcaggacgataacacaaattaaggaaagaaaataacattccgtaagaccgtgccgtccatttggcacaaatgaaatttatcagaaaatatcgacttcatattgtaagcggtaccaatgtggatgttgacttgaaatgctgagttgacaatgtttaaatggaaaagtcagatattttttggactgcaattatggtctgggaaaaaagaacgaacaaacgaagaagaattttgataggagcgtcatttatgtctaaaattattgcaattaacgcaggaagctcatctttaaaatttcagttattcgaaatgccttcagaaaaggtgctaacaaaaggtttagtagaacggatcggtatcgccgacagcgttttcacaatctctgttaacggcgaaaaaaatacagaagtgacagatattccggatcatgcggttgcggtgaagatgctgcttcacaagctgactgaattcggtattataaaggatttaaatgaaattgacggaatcggccaccgtgtggttcacggcggagaaaaattcagcgattctgttttgcttacggatgaaacaatccgtgagattgaagagatttcagaactagcgccgcttcacaacccggctaacatcgtcggcattaaagcctttaaagaagtgcttccgaatgtgcctgcggttgcagtgtttgatacggcgttccaccaaacgatgcctgaacaatcttacctgtacagcctaccgtacgaatactacgagaaatacggcattcgcaaatacggtttccacggcacatctcataaatacgtgacacagcgcgcagctgagcttctcggccgcccgcttgaagatttgcgtctgatttcctgccacctcggtaacggcgcaagtatcgcggcggtagaaggcggaaaatccattgatacgtcaatgggcttcacaccgcttgcgggtgttgcgatgggaacacgttcaggaaacatcgaccctgcattgattccgtacattatggaaaaaacggatcagacggcagatgaagtattaaatacgttaaataaaaagagcggactgcttggcgtatccggtttctccagcgaccttcgcgatatcgtagaagcttcaaaagaaggaaacgaaagagcggaaacggctcttgaagtgtttgcaagcagaatccataaatacatcggttcttacgctgcgagaatgagcggcgttgacgcaattattttcactgcgggtatcggtgaaaacagcgttgaagtcagagaacgcgtgcttcgcggcttagaattcatgggtgtatattgggatcctgcgctgaacaacgtgcgcggcgaggaagcgtttatcagctaccctcactctcctgtcaaagtcatgatcattccgactgacgaagaggtcatgatcgcacgcgacgttgtccgccttgcacagtaatgatcaaaaaaagcacatccttttagggtgtgcttttttattgaatgccccaggatcaaacgttacgatatgtttaatacataaacgatgaggtgaagcaatgagtgtgcatgaacataaacaagaagccccgtcagccgtgcgctgcaaggtgattacagtcagcgacacgagaacgaaagaaaccgacaaaagcgggcgcgtcatgatggacttcctcagggaagcgggatttgaaacggtcgcttatgacattgttaaagatgaaaaagatgaattgcagaaagccgttttatccggctgtatggatgaatatacagatgcggtgctgttaaacggagggacgggcattgccgaaagggatgtcacaattgaagcggtcacgccgctgttttcaaaagaacttccgggattcggcgagctgttccgcatgctgagctatacggaggacatcggttccgccgccattttgtccagagcggcagcgggtgtgatccaaaataccgcagtcttctgcacgcccggctcctcaggcgccgtaaagcttgcaatgagtaaactgattattcctgaactgcctcatgtgctccgggaaatccgaaaagatttataaatgtataaaaaggctctgctccgctcaaaaaattgggtggggttttttttataaaaggcttgaaaaaacagaatttacttgttacagtgtatacatacaaaatgcatttttattaattaaaactaatttttatacaaaagggagcttttaacatggcagaacaaaaaaaggttgtattggcatactcaggaggtcttgatacttctgtagcgataaaatggctgcaagaacagggatacgatgttgttgcctgctgcttagacgtaggggaaggaaaggatttggcattcgttcagcaaaaagcgctggaagtaggcgccgtaaattcctatgtgattgatgcgaaagaagaattcgcccgggagtacgcgctcatttctatgcaggcccatacaatgtatgaaggcaagtatccgctcgtatctgcactatcccgtccgttaatcgcgaaaaaactcgttgaagtcgcggaaaaggaaaacgcggtggccgtagcgcacggctgcacgggaaaaggcaacgatcaggtgcgtttcgaagtatccattaaatcattaaatcctgatctggaggtcattgctccggtccgtgagtggcaatggtcgcgtgaagaagaaattgaatatgctgcaagccgcggcataccgattccgatcaatcttgacagcccgtattccatcgaccagaacctatggggacgcgccaatgaatgcggtatattagaagatccgtgggcggcgccgcctgaaggggcatatgacctgacagcatctcttgaaaacacgccggacgttccggaaatcatcgaaatcgcatttgaagccggtgttccggtttcaatcgacggcgtaacctatccgctcgctgatttaattctcaagctgaacgagactgccggaaaacacggcatcggccggattgaccatgtggaaaaccgcctggtcggcattaagtcccgtgaagtttatgagtgcccgggcgccatgactttgattacggctcacaaagagcttgaggatctgactttagtgaaagaagtggcccatttcaaaccggcaattgaacaaaaactgtctgaaatcatctataacggtttatggttctcgccgttaaaagacgcgctgcttgcattcctgaaagaaacccaaaaacacgtcaccggcgtcgtgcgcgtcaagctgtttaaaggccatgccattgtagaaggacgtaagtcggaatattcactctacgacgaaaaacttgcgacatatacaaaagacgatgcttttgaccatcacgcggcaatcggtttcattgagctttgggggctgccgacaaaagtaaacagcattgtgaaaaagaaggagcagattgaagcatgaagaagctttggggaggccgttttcaaaaaacaccggaaaagtgggtcgatgagttcggcgcatccatcacattcgaccaaaacttagtcaaagaggatattacagggtctctcgctcatgcggcaatgctgaaaaaatgcggcattctgacggaagaagaagaaggcgccatccgacaggggctgcagaccctcctgcaaaaagcagaggaaggaacgcttgaattctctgttgattatgaagatatccatttgaatattgaaaaaatgctgatcgaagaaatcggaccgctaggcggcaagctccataccggcagaagccggaatgaccaggtggcgaccgacatgcatttgtatttgaaagatcatgtctcacatatcatcgtgctgattgaacagttccaaaaagcgctgatcgaaaaagcggaggcgaatgtcgagaccattctgccggggtacacccatttgcagcgggctcagccgatttctttcgcccaccatctgcttgcttatttttggatgcttgaacgggataaagagcgttttcgcgatgctatgaagcggattaacatatcgccgctcggatgcggggcgcttgccggaactacgtttccgatagaccgtaactattcggcggagctgctcggttttgactccatttatgagaacagtcttgacggagtcagtgacagagattttattctcgagtttttaagcggcagcagcatgctgatgatgcacctttcacgtttatcagaagaaatcattctatggtgctcgcaggaattcagattcattgaactggatgatacgtacgcgacgggaagcagcatgatgccgcagaagaaaaaccccgacatggcggagctgatccgcggtaaaaccggacgcgtatacggtgatatgatggggcttttcacgattatgaaagggctcccgctcgcttacaacaaagacctgcaggaagataaagaaggcatgtttgacacggtgaaaaccattgaaggaagccttcagattttcacgggcatgattgaaacgatgaaagtaaacaaagacatcatgaaacaagcgacaaaacaagatttttcaaacgcgacggaacttgccgattatttagctaaaaaaggcatgccgttcagagaagcgcatgaagtggtcggcaagcttgtgtacagctgcattgaaaaaggaatctatttaagtgatatggcatttgaagaattccttcaagccagcagtctctttgaagaagatatctataccgtgctcgatccgcatcatgcggttgaaaaaagaatgagcgccggcggaacgggttttcagcaggtagaacaggcgctcgtaaaagcaaaagcctgcgccggcatttaatttgctgaaatttccttcatattttcccggcatctcagacaccctacatctataaagatgggaggtagaaggaatgcgcaaagaacaagaccgttacatctatgatgaaaaagaaagtgaagaaacggccaggctcatctcagaggcatacgaaagcggttatgtcggcatggaggaagcctctgctccttcagaaaattaagctgtctgtaaagacggcttttttttcgtgcggacgaagtgcaaaaaagtgatattgccgtttgtttatagtaaagtagagggagaaacgtcttgattttattgaagcggcaacgttgcctggggagggtattcaatgtgcgacatgctctaatcactgccggtacaaagggattgggccgaaaagtgactgaaatgcttctggaaaaaggcttttctgtcacagtgaattacagacaagacgaagaagcggtcgcctgtctgaaggcggattatcccgggtgccatgacagattgcaattcgttaagggcgatgtaacccggaaagaagatctcatgcggatcgccgatgcagcccttcagcggtttggaaggattgacatactgattaacaatgccggaccgtacatatttgagcgcaaaaagcttgccgattactccgatgacgaatggtatgacatgcttgaagggaatttaagcgccgttttccatctgtttaaagcggttataccggtcatgagacggcagcggttcggccggattattacatacggttttcaaggagcggaccatgcccccggctggcttcaccgttcagctttcggagcggctaaagtcggattggcttcgttaacgaaaaccattgcgattgaagaagctgaatcaggcattacggccaatatggtctgcccgggtgatattgtaggagatatgaaagaagcgtctatagaggaagcaagacggaaaatcggcaaagaaaagacgccgatcggcaggtccggaaccggagaggacattgcgagaatcatcgcctttttatgtgaagatgattccgatcttgtaaccggaacggtcattgaagcaacaggcgggctgaatgtgattaacaggcatcaatccctgtaagttttttcgtttgtcaaaaagggaacttgataaatattaattttttatgaggtgaaaacgatgaaagtgacttatcacggacattctgtcattcaagtggaaacgaaaacccataacattatttttgatccgtttctgaccggaaacagtctgacaaatttgaaaccggaagaagtgaaagctgatgtcatcctgcttactcacggacacaatgaccatgtcggagatacagagcagatcgctaaacaaaacgatgcgctcgtcattgcgccgaatgagctggctgtttatctcggctttaaaggtttaaaggtccacccgatgcatatcggcggggcgcgccaatttgatttcggcaaagtgaaactgacacaggcattccacggatcggcggtcactgatgaagaaaacaaaaccattacgtacacggggatgccggccgggattttattgacgattgacggcaaaacgattttccacgccggggacacggcgctgttctctgatatgaaactgatcggggaactgaatcacattgacttggcgtttctgccgatcggcgataactttaccatgggccctgaagacgcgaaactcgcggctgaatggctgagagcgaaacaggtcgttcccgttcattacaatacatttcctgtcattgaacaggaccctgacgctttcgccgaaagtctgcctggaggcgtcggcaaagtcatggcggtcggcgagaccattgagcttgcctgacatatgtgtcaaagaccttctgaatcaagcattcagaaggtctttttgtgatgccgccttttttcgggcgtctcattgcgaatgaatcccccgtacccttataataaaagcagaagactgtccttagaggtgaaacgcttggcaacaaagcatgaacaaatcctatcatacatagattcgcttcctgtcggtgaaaaaatttcggtcagaagaattgcgaaagaaatgaaagtcagtgaaggaacggcttacagagccattaaggaagccgagaacaaaggattcgtttccactattgaacgtgtggggaccatccggattgaacagaagaaaaaagaaaatattgaaaagctgacatacgccgaggtcgtcaatgtgatagacggccaggtgctcggcggaaaagccggtctgcataaaacgttgaataagtttgtgatcggcgcgatggagcttgacgcgatgatgcgttatacggcggcggggaacctgttaatcgtcgggaaccgaatcaacgcccaccgccaggcgcttgaagcgggcgcggctgttttggtaacgggagggtttaataccgacgacagcattatcgagctggccgatatgcttgagcttccgattctctccacgagctacgatacctttacggtagccgcgatgatcaaccgggcgatctatgatcagctcataaaaaaagagattgtgctcgtggaagacattttgacgcccgcagatcggacagtgacgctgtcccctaaggataagctggagaaatggtacgaaaagaactatgaaaccggacacggccgcttcccggttatcgaccagcagatgaaaatccacggaatcctcacatcgaaagatatcgcggggcatgaccggtcagttccgattgaaaaagtaatgaccaaaaaccctgtcacggtgatcgggaaaacatctgtcgcctcagcggctcaaatgatggtttgggaaggaattgaagtgcttccggtgacagacgggcatcacaaactgattggaatgatcagccgccaggatgtcttaaaagcgcttcaaatggttcaaaagcagcctcaggtcggggaaaagctggatgatattgtttcaaggggatttaaagaagaggaagatgacaaaacgccggccgtttatcaatatgaagtcacgccgcaaatgaccaatcagctcggcacgatttcttacggggtgtttacgacgattttaacccaggccgccagccgatttttacgctcccgcaaacgcggcgagctggtcattgaaagcattacgattttcttcctgaagcccgtacagatggagtcggtcattgaagtgaaaccgcgcattttagaggcgggccggaaattcgggaaaatggaagtggaagtgtcaagccagagcggcatcgtttcaaaagcgatgctcatggtgcagctgatggagagaagttaagggacgcacccgggtcccttggcattcattatgcgtggtccctctccgcttcctttgcatggatgggctcataatgcttataggctttatacccggcccatgcgctgcctgctccgattaaaatgaagacgccgccgatgaccagggtcaggacggagtgaaacagaatcatttggtttactccgtacaaaagcaccagcgcgcctaatgccatacttgatttagccgaaaaacattccttctccagcgcccgtttcgtctggattccttttactttgtaatacacgtaaaagcaggcagaaagcccgatgagaaaaacaaaaaccagcataaatgaaatcctccattatatgagtttgcaaaaccgtttataccgttgctgaaagattttccttttccatggataaagagtatgattaaatgaataaaaacgaaaaggagaaagcgatgaaatccgaactgatcagaaccatatcattatatgacaccattatcttacatagacatgtgaggcctgacccggacgcctacggttcacagtgcggccttacggaaatcctgcgggaaacgtatcccgaaaaaaatatttttgccgtcggacagcctgagccgtccttgtcttttttatattccctcgatgaggtggatgacgaaacctataaagatgctcttgtcatcgtgtgcgacaccgcaaaccaaggcagggtcgacgatcagcgctaccattccggcgcaaagctcatgaaaatagaccaccatccaaatgaagatccgtatggcgatctgttatgggtcgatacgaatgcaagctccgtaagcgaaatgatctatgagctgtacctggaaggaaagcagcacggctggaaactgaatacgaaagcagctgagctgatctacgcgggtatcgtcggtgatacggggcgcttcttattcccgaacaccacaaaaaagacattaaaatacgcgggagagctcattgagttcccattttcatcgtcagagctgttcaatcaattgtatgaaacaaaattaaatgtggtgaagcttaacggctttatttatcaaaatgtgtcactgtctgaaaacggcgtcgcttccgtgttcattaaaaaagacattttggagacatatggaaccaccgcttctgaagcgtcgcagcttgtcggaacactcggaaatatttcgggtatccgcgcttgggtgtttttcgtagaagaagacgatcaaatcagagtccggttccgttcaaaaggtccggtcatcaacggaattgcccggaaatacaatggcggcggacatccgcttgcggccggcgcatccatcttcagctgggatgaaaccgatcagattcttgctgatctggaagaggtatgtaacgaacacaagtagaggggagaccctctttcttagtgttcatctgtcacggggatgaaccagcagccgaaatcagtcaggtcttcgtagacgcggagattacagatttggagttctttttttatgagggaagcgagtgtgtctgtttctgcatatgcggaatagccttgtctgattcgggctgcatgatcttttgccaagcgtcgttcactaaaaacctccattttcccttcctcccttcagaatcattgaaaatgtctcatttacagtttataaaaaagcggagaaaaaagcgacagatctatggaaaatttttaaaaatgacataattacgtcgcaaaagaaatatgaatttcgacagacaatctcgtataaatcgtcagttcctttacttcagctttaaattccttctcatttatggtgtatattttgttttcgatcgtccgttttaaaagctcctttgttttatacacgctttcaatatcttttgtgatgacttcagaaatattatctttcacttgttcctcaaatttcatcttgtcaggctgggcgattctgtatttttccccattgatcagcttcacatcaacactttggatgagaagtctttgcttattatcctcatttaatttatgaagatccttctgatagatggagatttggttttttaaatcccgcgcgtgctcacgctgcttttcaattaacgtcacttgttcttcctgaaacgttccgtatgtaaacagaaagaacagccagctgacgatggctccgcacatcattcccgcgaaaaaacgctgccatcccggttttttataatactcgggaattctcatgatgacatattctcctgggtcagccatgaaataatcagccagccggtctgcgcgccgcccattgctgaaataattaaaagaagctgtttgaagatgtcgcgcgtgttgccttcgaacagcccccgctcgaaactgtataccgcgtcaaatgttcccccgatggccgcgacaagcgcccagatcttcagcctgttcgccaattttgtgatcgccgtcagcggaggctcgcctgataaataagctccgaggccgccgatcagcgcgccgccgagcaacacaccgagggcgataaaataactgctgatgaaattcgccataaatccggcttcctgatccatatatacaccacctcacttttctatcatattgagcgaaacggacaagtatgatgatgagtcaaaaaagaacatttgtttcttaagaaaacccgtcttataatgtagaaaggcaaaatgaacgtatgggaaaggagtggcggcattgtcttttgttcacctgcaagtacatagcggctacagtctgttaaacagcgccgcttctgtaaaagagcttgttacacaagcgaaggaactcggatattcatcattggcgctgacggacgaaaatgtgatgtacggcgccattgagttttataaagcatgcaaatcaaacggaattaagccgattatcggtctgacggcttctatatacacggacgatacggagcttgaagcacacccgctcattcttttagcagagacaaacaccggatatcagaacctggtgaaaatctcaagtgcgctgcaatccatggcaaagggcggcatgaagcgaaaatggatgaagagctatcatgaggggctgatcgccattacgcccggtgaaaacggctacattgaaagcctgcttcaagccgggaagtttgaagaagcggtccgggctgccgaaggattccgggagctgttcggagacggccgtttttatttagggtaccagccgtttaaaggacatgagacgttatcagaagagattctccgcctgtcagccgagacggaaatcgctgtctgcgctgcgggggatgtccgatatatcaagaaagaagatcaagatgcgtaccgctgtctgtgcgctattaaagccggagagaagtgggaggatcagagcgggaatctgccggacttatacttgaggacgcctgaagaaatggcagagctttacacgcagcatccggaagcgattgaagcagccgcgcgtatcgcccggcaatgccgggtcgatgtcagcctcggacagacacagcttccgtcttttccggcgccggacggcaaatcagctgatgactatttagcggagatctgtcatgaggggctgcgcctccgtttcggcactcctgatgagcgcgctgtccgccggcttgaatatgagctggacgtcatcaggcgcatgaaattcagtgattattttctcatcgtatgggactttatgaagtacgcgcatgaaaagggcattgtgacaggcccgggaagggggtccgcggcaggctcgcttgtcgcttactcccttttcattaccgacgtggatccgcttaaacattctctgctgtttgagagatttcttaatcccgagcggatcagcatgccggatatcgatatcgatttccctgatacgagaagggatgaggtcattcagtatgtacaaaataagtacggggccatgcacgtcgcccagattatcaccttcgggacattggccgcaaaggcggcgttaagggataccgggagagtgttcggaatcagcccgaaagaagccgaccagcttgcccgcctgattccgtcaaaaccgggaatgacgcttgaggaagcgaggcggcagtccgctcagctgaacaggaggctgtccgaatccgccgttcttcataaagtgtttcagatcgcaaggaaaattgaaggtcttccgcggcacacgtcaacacacgcggcgggggtcgttctcagtaaagagccgctttcggaagttgtccctcttcaagaggggcatgacggcgtgtatttaacgcagtatgcgatggatcacttggaagatctcggtcttttaaaaatggactttttaggtttgcgcaacctgacgcttattgaatccattaaaacgatgattgaaaaagagacgaatacgaaaattgatttttccgagatttcttatcaggatgaaaaaacgttctcactattgtcaaacggtgatacgacgggtattttccagctggaatcatcaggaatgagaaacgtgctgaagcgcctgaagccgtcaagactggaagacattgtcgcggttaacgcgctttacaggccgggaccgatggaaaatattccgttatttatcgatcggaagcacgggcgggcgcgtgtggaagtgccgcacgaggacgtacgaaatattctcagtgacacttacggcgtcatcgtctatcaagagcagattatgatgatcgcctcgcgcatggcagggttttcattaggtgaagcggatctgctcagacgggctgtcagcaaaaagcaaaaggacattctggacagagagcgaagccattttgttgaagggtgcttaaaaaaggagtattctgtagtcactgcaaacgaggtctacgatctgattgtaaaattcgctaactacggattcaacagaagccatgctgtcgcatacagcatgatcggctatcagctcgcctatttaaaagcgcattatccgttatattttatgtgcgggctgttgacgagcgtcatcggcaatgaggacaaaatatcgcaatatctgcatgaagcgaaggggagcgggattcaagtccttccgccgtcaataaacaaaagcggttttccgtttgcgccggaaaacggagccgtcagatacagtttgcgggccgttaaaaacgtaggcgtctcggcagtgaaagatatttataaagcaagaacacataaaccgttcgaggatcttttcgatttctgctttcgcgtacctgcaaaaagcgtgaatcggaaaaccatcgaagcccttatattttctggcgccatggacgaattcaatcaaaatcgcgccgccttgctggcctccgttgatgtggctttagagcacgctgaactttttcgtgcagacgatgaccaaatgggattgtttttggaagaatcgttctccattaagccaaaatatgtagaggctgaggaatttccgctcgtggacaagcttcggttcgaaaaagaagctctcggtgtttatttctcaagccatcctttgtctgctttcagggatctcctgaaaaaacggggggcgaaagcgatcacagcagcgcggcagatgccgaaggggcagctgtcaatcggcgctttgctcgcgggcattaaaacgattcggacaaagacaggtcagcatatggcgtttctcacattaagcgatgaaacgggagaaatggaagccgtcgtgtttcctgaccaatatagaaggctgtctccgctgttagaagaaggcgcgcttttattcgccgccggaaaaatggaagagcgtcaggagaagacacaattcatcatgtcatccgcctctcttcttgagcagacggaggcagacagagcgccgtctgtttacatcaaaatcgaaggcagccggcacaatcaggagtttttggaaaagatgaagcgtattttactggagcataaaggggaaaccggcgtttatctatattatgaaaaagacaagcagacgatcaggctgccggatacttttcatattcaggcggaccatcaggcgttataccgtttaaaagagctgctgggccgcgaaaacgtcgtgttaaaatagtggtaacaataatcgttttgttatacaattgaaacaattgtgctatcttatttaaagattctgaaatttttcacctccagcgattgtaccagtctatgcggcagaatatgtaacaaagtacttaaaaggagtgtttagaatgtcattaagagaagaagcgttacatttacacaaagtaaatcaaggaaagctggaatcaaaagcaaaggtagaagtcagaaacgcagacgacttaagccttgcatactctcccggagtagctgagccttgtaaagagatttatgacgataaaaacaaagtatatgattatacaatgaaggggaacatggtagcagtcgtaacagacggatcagccgttctcggactcggtaatatcgggcctgaagcttcacttccggtcatggaagggaaagcggtgctgttcaaaagtttcgcgggtgtggatgcattcccgatcgcgcttgacacaaacgatgtggacaaaatcattgacactgtaaagctgcttgcaccgacattcggcggtgtcaaccttgaagatattgcggcgccgaactgcttcattatcgaagagcgcctgaaaaaagaaacaaacattccggttttccacgatgatcagcacggcactgccatcgtaaccgttgccggacttgtaaacgcgctgaaattatcaggtaaatccatgtcatccattaaagttgtggcaaacggagcgggagcggcaggcatcgcgatcatcaagcttctttaccatttcggcgtacgcaacatcgtaatgtgcgactctaaaggggcgatttacgaagggcgtccggccggcatgaacgcagtgaaaaacgaagtggcgaagtttacaaaccaagaccgcaacgacggttcgcttcaggatgtcattaaagatgcagacgtctttatcggcgtatcagtcgaaggcgcgctgacgaaagaaatggtggagagcatggcgaaagatccgattatcttcgcaatggccaacccgaatccggaaatcatgcctgaagacgcgcgcgcagccggcgcaagcgtaatcggaacaggccgttctgatttcccgaaccaggtcaacaacgttctggcattccctggaattttccgcggggcgcttgacgttcgcgcgactcacatcaacgaagaaatgaaaattgctgcggttgaagcgattgcttcccttgttacagaggaagaattaagcgctgattatgtcatcccggctccatttgacaaacgtgtggctcctgccgttgcgaaagctgttgcgaaagcagcgatggaaacgggcgtcgccagaattacggtcgatcctgaggaagtggctgaaaaaacaagacagcttacggtcatcggtgaataataacacaaaaatgaaatggcagcgcgttggaaaaaaacaacgcgctgctgttcaatatacggactgctggcatttttttaagggcaggtcttaaaaaaatttcagcagaatccttatttcttttgaaaacgctgacagataaggctgaacaacgcttttcacggtatgaaatccgtccgtttccgtctgttttgcagcaaaaaatgtcgaatggaggatgacaccgtttgacaaaaaaagtacaatagtttcggtaaagttattattaagtctatctaatcggaagacatgcagtgaagagaacccttcacaaaagggaggtaatcatttgttaaaggatatattcacaaaaaagaaaaaatatgcttccgtgccgtctgagcaggcaaaacatgatgttccggaaggcattatgacaaagtgctccaaatgtaaaaaaatcatgctcacaaaagagttagataaaaacctgcgcgtctgcatgaactgcgggcaccatttcccgatgaatgcaaagcagcgcattgaaagcctcctggatgaagattcattcgaagaattcaaccagggaatgatatctgaaaacccgctcggtttcccggaatacttagaaaaaatcgaaaaagaccgtgagaaaacatcgctgaatgaagcggtggttaccggaaaaggaaccatcagcggattcccggccgtgatcgcgatcatggattcaacattccgaatgggcagcatgggttcggttgtcggcgaaaaaatcacgcttgcaattgaaaaagcaaaagaggaaaaagtcccgtttatcatctttaccgcttcaggcggcgcacgtatgcaggagggggtcttaagccttatgcaaatggccaagacaagctctgcattaaaactgttcagtgaggagcagggactgattatttctgtcatgacccatccgacgacaggcggcgtatcggccagtttcgcgtctctcggtgattataatttcgctgaaccgggcgccttgatcggatttgccggaagacgtattattgaacagacgatcggggaaaaactgccggaagatttccagacggcggaatttttattaaagcacggccagcttgatgcggtgattcaccgaaacgacatgaaagacaaactcgcatttctgctggacatgcaccaaacaggaggtgagcatgagtggctgcaagattagaatttgaaaaaccagtgattgaactgcagacgaaaatcgccgaactgaaaaaattcacccaagattcggagatggatttaagcgctgaaatcgcaaggcttgaagaccggctcagcaagcttcaggatgagatttataaaaacctgaagccgtgggacagagtgcagatcgcacgccttcccgaccggccgacgacgcttgattacattcaatacctgtttaccgacttttttgagtgccacggagacagaacatacggagatgatgcggcgattgtcggcggagtcgccaaatatcacggcatgccggtcaccgtcatcggacatcagcgcggaaaagacacgaaagaaaaccttgtccgcaatttcgggatgcctcaccctgagggctaccgcaaagcgcttcgtctcatgaagcaggcggataagttcaaccgcccgattatctgcttcatcgacacgaagggagcgtacccgggtaaagcggcggaggaacggggacaaagtgaagccatcgccaagaacctgttcgagatggccggcctgaaagtgcctgtcgtttgtatcgtcatcggggaaggcggcagcggaggcgcgcttgcgttaggtgtgggcaaccgcatgctgatgcttgagaactcgacgtattccgttatttctcctgaaggagccgcatccattttgtggaaagactccagccttgcgaaaaaagcggccgaaaccatgaagattactgcgcccgatttattagaattaggaattattgatgatatgattaaagaagtgaagggcggagctcaccatgatatcaagcagcaggcgggctacattgacggtatacttaaagcaacgttaaaatctcttcttcaattgaacgccgaagaattgatctcacagcgatatgaaaaatataaagcaatcgggaaagtttcggttgaggatcaatatatcggggtaaactgaatagacgtgaagcctatggctcacgtttattttttgtgatttttgtgatattccttaaattttatttaaaaacaatttatttaattgtataataggtaaggtttcatgggagctcaggcgtcccttttcattgttttagggcaatgatcatgatatgtttaacatatatatgttgctgaggtgaataggaaatgaagcgtataggagttttaacgagcggcggggattccccgggtatgaacgctgcggtgcgcgcggttgtgcggaaagctatctaccacgacgtcgaagtgtacggaatttataacggttattcaggattaatcagcggaaaaatagagaaactggagcttggttcggtcggtgacatcatccaccgcggcggaacaaagctgtatacggccagatgtcctgaattcaaaacagttgaaggccgtgaaaaaggaatcgaaaatttaaagaagctcggcattgaaggtcttgtcgtcatcggcggagacggttcatacatgggtgcgaaaaaattaacggaacacgggtttccgtgtgtgggtgtaccgggtacgatagataatgacatcccgggaactgattttacgatcggatttgatacggcgttaaacaccgtaattgatgcgattgataaaatccgtgacaccgctacgtctcatgagcgtacatacgttattgaagtgatggggcgccatgcgggcgacattgctttatgggcaggtcttgcaggcggagcggaatcaattttaattcctgaagcggactacgatatgcaggaaattatcggccgtttgaagagagggcacgaccgcggcaaaaaacacagtatcatcatcgttgcagaaggggtaggcagcggggttgaattcggaaaacgcatcgaagaagaaacgaaccttgaaacacgggtatccgttttagggcacatccagcgcggcggatctccaagcgcttctgaccgggttcttgcaagccgcctcggcgcttacgcggttgagcttctgcttaaaggaaaaggcggacgctgcgtaggtatacaaaacaacaagcttgtagaccatgatattatagaaattttagaatcaaaacatactgttgaaccaaacatgtatcagctttcaaaagaactgtctatttaaggcggaagaagctgaagatttcagaaggaagtgaacgagttgaaaaaaacaaaaatcgtttgtacaatcggtccggccagtgaaagtgtagaaatgctgacaaaattgatggaagcgggtatgaacgttgctcgtctgaatttttcacacggtgatttcgaagagcacggcgcaagaatcaaaaacatcagagaagcaagcaaaaagctcggcaaaaacgtggggattctcctcgatacgaaaggtccggaaatccgcacgcacgatatggaaaacggcgcgcttgagcttcaggcgggaaatgaaattatcgtttctacgaaacaggtgctgggaacgcttgaaaaattctcagtttcttatgaaggcctggcagacgacgtgtcagcagggtctatcatcctgttggatgacggtttaatcggattggaagtgctagaatcaaatccggaaaaacacgaaatcaaaacaaaaatcttaaacagcggcacgctgaaaaataaaaaaggcgtaaacgttcccggcgtcagcgtcaaccttcccggaattactgaaaaagacgccaaagacatcgtattcggtatcgagcaaggcgttgatttcatcgctgcgtcatttgtacgccgttctacggatgtccttgaaatccgcgaactgcttgaagagcataacgcgtctgacattcaaatcattcctaagatcgagaaccaggaaggcgtggacaacctggacgcgatcctggaagtatctgacggcttaatggtagcgcgcggagacctcggcgtagagattccggccgaagaagtgccgctcgtgcaaaaagaaatgatcaaaaaatgcaacgcgctcggcaaaccggttattactgcgacacaaatgcttgacagcatgcagcgcaaccctcgtccgacacgcgctgaagcaagtgacgttgccaacgccattttcgacggcacagatgctatcatgctttccggtgagacggctgcgggacaatatcctgtcgaggcggttcaaacaatgtttaacatcgccacacgcacggaagaatctctgaactacaaagaaattctgtctaaacgcagagatcaggtcggcatgacgattaccgatgcgatcggccaatcagttgcgcacacggcgatcaatctgagtgcggcagctatcgttacccctacagaaagcggccatacggcgcgtatgatcgcgaaataccgtccgcaggctccgattgtagccgttacggttaatgagtctgtatcacgcaaactcggccttgtattcggcgtatttccggcaagcggccaaaacgcgaattcaaccgatgaaatgcttgaagacgcggttcaaaaatcacttgacagcggcatcgtgaaacgcggtgatctgattgtcattacagcaggttctgtcggtgaatcaggcacgacgaatctgatgaaagtccacactgtcggcagcattatcgcgaaagggcaaggcatcgggcgcaaatctgcattcggtccggtcgttgttgcaaaaaatgcgaaagaagctgaacaaaaaatgacagacggcgcagtattggttgcttcaagcactgaccgcgacatgatcgcttcacttgaaaaagcatcagcgctcatcactgaagaaggcggtctgacaagccatgcagccgttgtcggtttaagcttgggcattccggttatcgtcggtctggagaacgcaacttcagttttaacagaaggacaggttatcacagttgacgctgcccgcggcgctgtgtatgaaggccgcgcaagcgttctttaaacagctttaaaaaagagaggggggttctcccttctcttttgtctttaggtttattttcctattcccatgcgggcggtgacgcgcttttagaagggcaggagggcagaaaaatgagagtgttattcttactgtttatcgtgtgtccggcaattgaaatcggtttgtttctgctggcgggaaaatggctcggtatttttccgaccttccttctcatcattttgacaggcgtgttaggcgccttggtggcaaaaagacagggaaccgatgtgtatcatcgggtgatgcgcgacctgcagcacggcaaaatgccgggggaagcgcttcttgacggaatatgcgtctttttcggaggcctgcttttgatgcttccgggttttctgtccgatattgcaggggcctgtcttctgattccgttcactcggaaccgcatgaagccgcttttgttcaaatggctgagaggaatgtcaaaaaacaagcggatcattatcaaataaaaacggcagccttcttacagggctgctgtttttatttggactgaacagtaatataggcccatatttcttttaaagcgcccgttgtgataaaggcctgaatgaaaacgagcagcgcgggccccgcagccagtcctaaaattccgaacaatttaaagccggcaaacagagcgattaaggtcgcaagcggatcaagtccgattgacttgcttaaaattttcggctccgtcagctggcgctggataagaaccacaatatataaaacaccgagaccgatcgcttgaggaagctgaccggcaatggccaaatacataatccagggaacaaagaccgatccggcgccgagatacgggagcaggtccaccaggccgataaaaaaggcgatggttgccgcatgctcaatccctaaaagaaaaagtccgataaagacaatgatcatcgtgaaaagtatgagcacggcctgcgccttaatgaaacctgccatcgcttttttcagctctcccgatacggccttggcgtttgccgaaacccgttccggaagaatggaataaagcagcgccttcagcttatgccagtcctttgtcataaaaaaagtcgccagcattgcgaaaatgaagacggcagctgtattgggaaggaaggcaatccatttcggcaccagctccaaaagatgtgaaagcatcagccccgcatttttagcggctgtatcaccgagggtctgaatatgcgtcacgatggatgcctgctgattggtttcaagcccgttaaataagacggtcagctcgtggtacaatggctgaatgcgggaagtgaacagctcttcgcaatacgtcataaaggcgctgatatggggagggagcgttttggccagataggcggttcccgaaatgatttccgcaacgagaaatgtcgccgcgccgagaagaataagcaaaaagaagaccaggacaatgactgtattgactgaccggggcagccccgtcagtttgtccagccagtcaacaacgggaatgatcgctgatgacagaataagggcgatcagaaacggataagttaacggaaatgaggcgtaaccggccgctaaagcgccgccggccgcagcgagtacaaacagcgcgcggaaaaaaacagttgcatagtgcggattcacatcgatcctcctctcggtcggcacgtcctattacattagtttattcgtcaaaaaaaaggatatgaatacagatatgatgaaagagggtgctttcaggatgtttacacaagcgaatttatttttactattattgctggccatcgcattgatagccaaaaatcagtcattgctttttgccgtcggctttctcattgtgataaaagctgtcggtcttgatcagaaactatttccggttattcagtcaaaaggcatcaactggggggtcaccgtcattacaatcgccgttttagtgccgattgccacaggtgatatcggttttaaacagctcggagaagcgatgaaatcatattatgcgtggatcgctctcggtgccgggatcgcggttgccttaatcgccaaaaacggtctcaccttattggaaaacgaccctcatattacaacggcgctggtcatcggcacgatacttgccgtcgcgcttttcggaggcgtcgccgtaggcccgttaatcggcgccggaatcgcctacttggccatgcaaatcgttaaaatattcacttcgtaaagtaaaaaagcggcgtaaagctgctttttttgtggagaaaattagagtttgcacttgcgcattttgtagttcagacaaatgccatttacattattccgatgaatgaagcggcttaccatgtaacaaagagcttcgggattgacggcgcacatggagtgaaaacagcgattgcagtagattaaaagctgatgggatttatgggcctgataccaaagcaaaacttgaagtgttgttaaaataagcggagaccctttccttcaatttgaaagtttgttaaatttataatgagaatgaaaaaacacaattcggttggtagtccggatgcatgatttaaaatgtcagtaaccttcccctcctcgggatgtccatcattcttcagtaaatttaggaggagggaatcgttatgaaattaacggtttactacgatggtcagttttgggtaggagtcattgaagttgtgaatgacgggaaattaagagcaattcgtcatttgtttggacaagagccaaaggattcagaaataatgcattttgttaataatcaacttttacagactctctcccacactgaacaagaaggggtttgtgttaaagcaaaatctaagaaattaaacccaaaaagattgcagcgacaagcttctaaagaaatgaaaaatatcgggatatcaactaaggcacaaaaagcgataaaacaggagcttgaagcaagaaaagaaaagaaaaaacaactgaatagaaaacaaagagaaaaaataaaggaacaaaaatatttaatcagaaaacaaaaagcaaaagaaaagcgtaggggcaaatagttggagagccctataaagcccttcgattgaaaagttgagcggcatcagttagtttcttcggactgatttagagaaaaaaagtataagtcagagcccttctcgagatgaggagggtttttctgccatttatttaaaatcacttacatcagtaaatgagtcagtttcaattgatgaacggtttgatgaggatatttacagcccgaaaacagcgcaaatgcagtcaaacgattccagtccatgtgcggcatgactgctgacggcatttattggccaaagacaaagatgaaaatcagcgttaaagaaacaggaaaaattagataaagaacgaaaaaaatttctaaatatagttggattggtatattattgaaccctgcatatgtgctaacaatagcagctttaaataggtgtaacagtaggtaaattactaaggttagtatttgggttctaatatttgggtagggggaaataatgctatcacttaatagagctttaaaattacgtgatttagaagtttttcgtatgctgaaagatggtaacattttatcttacgtaataattgaagatactcgaaagccatttacagaagaagacaaaaaattagaaccactgtgttatatggacgaagaagatattaatgcgattttaaacgtttttaagatttcaattgttaatgatgaaaaattaaatgaagatgattcaatttttataagatcttacttttctgaatttgttaatcatacaaatttaacgaattttattattaaagaatatgttcaaaagaatttatatgattacgatgatgaagatgacatcattttttttaatagaattttacgtagtataggatcagattatgttatcaaagaatttgacgatataaattgaatttatttatctcaagattgatttcttatttagattttgaaggagtacagaaggtaatttctgtactcctttttaagacaaaaaatagacttctagtttctcttatagcataaatacacttgacgaaaatcgtaagttcagcacccgcaaggggtgtataaaagtgctttattgtcatggatgttctatttccaaaatcgctatcaatttttgttattttcggttaattaggaaaattgaggtattttttcgtttgcagaaaataagaaattagtggaaaataaatcaaaagaggaggaggggaatgcatggtggagtctcaacttcaaatacagcggggggattgtttgtatgaatattaaaaaagcaatttgtttctctgtctctgctttcgctattacgttcggtgtaattgcttttgtaggaaacacgactcatcttcatcataatgcagccaaaactgataacgaggtaatacaactagctgcgcgactgcaaacatgatttcgaaacaaaaaaagatgtggcctttttagggctgcatctttttttgtcatgtattttcgttttttctctttttaggcggggctgcggctgctgcatttataagcatggtaacaggttatgtgaagtccgcagaaaaatacaaatggatcgttatatacacaaaagcgaaatacgaagtaacaacaaagataaaagatatatataagaaaatttgagccaactaaaaccaagacctggatttctgaagctgatccgaacattgattcagtcgagtaaacaaaataacccccttctccggtaaagaaggggggttaaatttgctgtgaagttgtcgcgcctgtccttttaaagtctcctccaaaacacccccaaatgaaaacatgagaatacatggttttacaaagcgcctgaaagcaagcgattaaatttatcaacgcaaaaccttgatatatagggcttttaaaacatttttagttaaaagtctacaaattaatcagattattgtttataataagaataggcttaaacttaaataagcttataagaatttgttatgttcctctataagcatatcggttatgtaaccgcaatcagtgaaatgtaagcattttcttaaaggggaaagggattgtttgcatgactcattttaagtaagccgtatgttttatatactctttaaaggggaattttgattgaaaaggagaggttgaatatgacagcaacacgcggtcttgaaggggttgtagcaacaacatcatctgtaagctctattatcgacgatacccttacatatgtagggtacgatattgacgacttgacagagaatgcaagttttgaagaaatcatttatttgctgtggcatctgcgcctgccgaataaaacggaacttgctgaactgaaaaaacagcttgcgaaagaagctgccgttccacaagaaatcattgagcacttcaaatcatatcccctcaataacgtacatccaatggctgcgctccggacggcgatttcattactcggtctgactgacagtgaagccgatgccatgaatccggaagcgaactacagaaaagccatccgtctgcaggcgaaagtgccgggcattgtcgccgctttctcaagaatccgcaaaggacttgatcctgttgaaccgaaggaagagtacggaatcgcggagaacttcctttacaccttaaacggtgaagagccttctccgatcgaagtggaagcgtttaacaaagcgctcattcttcatgcggatcatgagctgaacgcatcaacatttacggcgagagtatgtgtcgccaccttatctgatatttactcaggcatcactgccgccatcggcgctttaaaaggaccgcttcacggcggagccaatgaagccgtcatgaaaatgctgacagaaatcggcgaagtggaaaacgccgagccttatatccgcagcaaaatggagaaaaaggaaaaagtaatgggcttcggacaccgtgtgtataagcatggagacccgcgcgccaaacacttaaaagaaatgagcaaacgcctgacgaatctgacgggggaaagcaaatggtatgagatgtcaatccgtgtcgaagaaatcgtgacgtcggagaaaaaactcccgcctaacgttgatttctattccgcatctgtataccacagtctcggcattgatcacgatctgttcacgccgatctttgcggtcagcagaatgtcaggatggatcgcccatattcttgaacagtacgataacaaccgcctcatccgcccgcgcgctgattacacgggtccggataagcagacttttgttccgattgatgaaagagcctgatcaaacgggaggctggtgattttcatgtcgttagcctcttgttaatcaagcccggattggtttacaattttgatagaatcttgagaaaagtcattttattttctatacaagaaaaataaaatgttttctaaatatgaattacatactgggaggtaatattgtgtcacaaggtgaaaaaattacagtctctaatggagtattaaacgtaccaaataatccgattatcccgtttattgaaggcgacggcacaggccctgatatttggaacgccgcttctaaagtattggaagccgctgttgaaaaagcatataaaggcgagaaaaaaatcacgtggaaagaagtttatgccggtgaaaaggcttataataaaacaggtgagtggcttcctgccgaaacgctggaagacatcagagagtacttcatcgccatcaaaggtcctctgacgacaccggtcggcggcggtatccgttctctgaacgtggcgctgagacaggagcttgatttgtttacgtgcctgcgccctgtcagatatttcacgggagtgccttctccggtcaaacgacctgaagatacggatatggtcattttccgcgagaatacggaagatatttatgccggaattgagtatgcgaaaggttctgaagaggttgaaaagctgatcagcttcctgcaaaatgaaatgggtgttaacaaaatccgtttccctgaaacgtcaggaatcggcatcaaacctgtttctgaagaaggcacaagccgcttagtcagagctgccattgagtatgcgatcgaaaacggccgtaagtctgtcacgcttgtccacaaaggaaacatcatgaagttcactgaaggggcatttaaaaactggggctacgagcttgccgaaagagaatacggagataaagtattcacttgggctgaatatgaccgcattgtcgaaaaagacggaaaagaagctgctgataaagcgcagagcgacgcggaagcggcaggaaaaatcatcgtcaaagacagcatcgctgatattttccttcagcagatcttaacccgtccgagcgaattcgacgtcgtggcgacaatgaacttaaacggagactatatctctgatgcgcttgccgctcaggtaggcggaatcggaatcgcgccgggagcgaacatcaactatgaaacagggcatgcgattttcgaagcgactcacggaacggctccaaagtatgccggccttgacaaagtcaacccgtcatccgtcatcctttcaggagtgcttcttcttgaacacctgaactggaatgaggctgctgacttgatcattaaatctatggaaaaaacgattgcttcaaaagtagtaacgtacgattttgctagattaatggacggcgcaactgaagtgaaatgttcagagtttggtgaagagctaattaaaaacatggactgaacctaaagcagacttctaatgaagccaaaaaaggagaagagaatcatgggaaaaacacgcagtaaagtttctgttatcggagcaggatttacgggagcgacaacagcctttctgacagctcaaaaagagcttgcggacgttgtgctcgttgatattccgcaattagaaaacccgacaaaaggaaaagcgctagacatgctcgaagcaagtccggtccaaggatttgacgcgaaaatcacaggcacgtccaactacgaggacacagccggttctgatatcgtcgtcatcacagccggaattgcgagaaaaccgggcatgagccgtgatgatctcgtatctacaaacgaaaaaatcatgagaagcgtcacacgtgagatcgtgaaatattctcctgactgcattatcgttgtattgacaaaccctgttgatgcgatgacatatgcggtgtacaaagaatcaggcttcccgaaagaacgcgtcatcggacaatccggagtgcttgacactgcacgattcagaacattcgtcgctgaagaattaaacctgtctgtaaaagacgtgaccggttttgttcttggcggacacggtgacgacatggttcctctcgtccgttattcctatgcgggcggcattccgcttgaaacgcttatcccgaaagaccgtcttgatgcgattgtagaacgtacaagaaaaggcggcggggaaatcgtcaaccttctcggcaacggaagcgcctactacgcgcctgctgcatcactgactgaaatggtagaagccattttgaaagatcagcgccgcgtgcttccgaccatcgcttacttagaaggcgaatacggtcatgaaggcatttacttaggcgtaccgacgattatcggaggaaacggcctagagcaaatcatcgagcttgaactgacagactatgaaaaagcgcagctgagtaaatcagttgaatctgtcaaaaatgtgatgaaagtattgtcataagaaaaaagggaaggcttccgaatcagaagccttcctctttttacaattaatgaaagcgttttctttttccctgagcgatcctttctctgaaaatgatcaaaaaggcgaattgtctgaacgggcagtattggataaaatgaaatcataaagtgatatgcagcacataaaatagagaaaattggatgtcggggaaaatagacagcggagggcgcagcatgaacaaaaaaattttagttgtagatgatgaacaatctatcgttactcttttacagtataatctggaacggtccggctatgatgtcattaccgcatcagacggagaagaggctctggagctggcagagaatgaaaatccggatttaatcgtactggatgtcatgctgccgaaagtggacggaatcgacgtctgtaagcagctcagacagcagaaaatgatggtcccgatcttgatgctgacagcaaaagatgaggagtttgataaagtgctgggactggagctcggagcggatgattacatgacaaagccgttcagtccgcgggaagtcactgcgcgggtgaaagccattttaagaagggctgacatttcttcgctgtcacaaggcagagaagaggaaaaggacgggcagatcctcatcggcgagctgaaaattcttccggagcattacgaagcgtacttcaagtcagaacagctggaattgacgcctaaagaatttgaactgcttctgtatttgggaaaacataagggaagagtgctgacgagagatcttctgctgagcgcggtctggaactatgattttgccggggacacccggattgttgacgttcatatcagtcatctgcgcgacaaaatcgaatcaaataccaaaaaacccatctatattaaaacaatcagaggtttggggtataaactggaggagccaaaaatgaatgaataaagtccgtgtgcgtctgttcgctttactcgttgtatgtatcatattggttttcagtgttctcggcctttttttacagcagcttatttcttcatccgctgaagaaagaacggcggatcagctgaaaaaggaatcggtatacatagcgggccttcttgacgccggcagaatcggcaataaaagcaatgaaacggtaatccgtgacgccggccgcaccctcggtataaacgtcgccgtgctcaacgagaagggtgacgccgtataccattccggcagtcgtgctgatgattcagccgtaaaggagttcatttctcacaataaaagcgaggaagccgtacagtcgaaaagcaaagtcatccgcggcactgccgtaaaaaatgacgccgggaaaattgcggggtatgtactcgtttcctctgagatcaacggcggttcaagcgttaccggagaaatgtggggcatgctggcagcaagtctttgtaccgcttttatcattatcgttttcttttatacaaacatgacgtcccgttacaaaaaatcaatcgacgccgcgacaaaagtggcgacggagctgtccaaggggaattatgacgcccgctcctacagcggttacgcaaggcggtcggaccgtctcgggcgtgcgatgaacagcctggcggtcgatttaatggaaatgacgagaacgcaggatatgcaacgcgatcgtctgttaaccgtcattgaaaatatcggatccggtttgattttaatagacgggagaggttttattaatctcgtgaaccggtcatacacgaagcagtttcatacaaagcctgaacgtctgcttcggcgcctttaccatgatgcgtttgaacatgaggagatcattcggcttgtcgaagacatttttatgacggagacgaaaaaatgccagctgctcagacttcccatcaacattgagcggcgctactttgaagttgacggcgttccgatcatgggccctgacgatgaatggaagggcatcgtcctcgtctttcacgatatgacggaaattaaaaaattggagcagatgagaaaggacttcgtcgccaatgtctcccatgaactgaaaacaccgatcacctccattaaaggctttacggaaacactgttagacggagcgatgaaagacgaaaaggcgctttcagactttctgtctatcattctgaaagaaagtgagcggctccaatctctcgtgcaggatttactggatttatccaagatggagcagcaaaactttacgatgcgcgtagagtcctttgacgccgcaaaaatcctccatgaaatcgaagcccttttacagcataaggctgaggaaaaaggcatcagttttcagctcgatcttccggaggagccgatttttgtgatgggtgatgtgcacaggctgaagcaggtattcctgaatctggcgaacaacgctttaacctacacgcctgaaaaagggacggtggcgatttcggtaaatgtgaaagaaaccgctgtcgatatcaaagtgtccgatacgggaatcggcattcagaaggaagagattccgcggatatttgagagattctaccgcgtggataaagacagaagccgcaactcgggaggaaccgggctcggtcttgccatcgtaaagcacttaatagaagcccatgaaggtaaaatcgaggtcacaagcgagccgggacaggggactgtatttaccgtgacgctgaagcggcagccggaagcgtgatcagctttacaaaggattaacaatttcttcatgacctgttaaacctatcttgttaggatgtaacagaaccccttcatccaaggagccaattttgacggcgggaacgtgttttcttgttcccgtccttttttgcgttttcacggggttcgctcattttcctttcaaattgaactttgttaaaataagagaagctgtgagattaaaaaatagaggaatgacgagcttttgctcttaggaggatattgaatgacggaacgaaaaaaattagtgcttgtcgacggaaacagtctggcgtaccgagcgttttttgcattgccgcttttaagcaatgaaaaaggcatccatacaaatgccgtatacgggtttgcgatgattttaatgaaaatgctggaagatgaaaagccgacccacatgctggtggcttttgatgcggggaaaaccactttccgccacagcacgtttaaagaatataaaggcggaagacaaaaaacgccgccggagctttcagaacagatgccgttcatccgcgagctccttgatgcctataacatcagccgctacgagcttcctgaatatgaagcggacgatattatcggcacccttgctgtatctgctgaaaaagaaggcttcgaagtaaaggtagtttcgggggacaaggacttaacccagcttgcaaccgggaaaacgaccgttgccattacgagaaaaggcattactgacgtggaagattacacgccggagcacgtgcaagaaaagtacggtctgacccctttgcaaatcattgatatgaagggattaatgggggattcatccgataacataccgggcgtccccggcgtcggagaaaaaaccgcgattaagctcttaaagcagttccattcggttgagaaactgcttgattccattgatgaagtcagcggaaaaaaattaaaagaaaagcttgaagaatacaaggaacaagccctgatgagcaaagagctggcgacgattatgacaaatgcgccgattgaagtcaagcccgaagatttaggttaccaagggtttgaccgtgaacaagttgttgccatttttaaagacctgggttttaatacgcttcttgagcggctcggtgaagaaagcggggaaacggcggaagaaaattttgaagacatcaatgtcgaaacggcagaagaaatcaccgaagatatgctcgtttcgccgtccgctttggtcgtcgaacaaatcggtgataactatcacgaagaaccgatcctcggcttttccatcgtgaatgaaacaggtctttattatattccgaaagaaatcgccattcagtctgaagcttttaaatcttgggctgaagatgaatcgatgaaaaagtgggtgttcgacagcaaacgttccgtcgtcgctttgcgctggcagggaattgagctgaagggaacggaatttgacgcgcttcttgctgcctacattataaacccgggcaattcgtacgacgatgtcgcgagcgtagcgaaagaatacgggctgaatatcgtttcaaaagatgaagcggtctacggaaaaggcgcaaagcgcgccgttccggctgaaaaagagcttgccgatcatctcgcgcggaaagcgtctgccgttaacagcctccgtgacaaactgctcgacgctttggaagaaaataatcagcttgaattatatgaaggtctcgaactcccgcttgcgctaattctcggagaaatggaatcaatgggcgtcaaagtggatgttgaaagactgaagcgaatgggcgaagagctcaaggcaaagctgaaagaatatgaagaaaaaatccatgacatcgccggtgagccgtttaacatcaattcaccaaaacagctcggcgtcattctgtttgaaaagctcggcctgccgccagtaaagaaaacaaaaacaggctattccacttcagccgatgtgcttgagaagctcgcagacaaacatgatatcgtcgcgcacattctgcaatacagacaaatcggcaaactccaatcgacttatattgaagggctgctgaaggtcacgcgcaaggattctcataaagtgcatacacgattcaatcaggcattgactcaaaccggacgcctcagctcaacggatccgaacctgcaaaatattccgatccggctggaggaagggcggaaaatccgtcaggctttcgtaccgtccgaaccggactggcttattttcgccgccgattattcacaaattgaattaagggtgcttgcgcatatttcaaaagatgaaaatctgatcgaagcgtttacgaatgacatggacattcacacaaaaaccgccatggacgtgtttcatgtcagtgaagatgaagtgacacaagcgatgcgccgccaggcaaaggccgtcaatttcggcattgtttacggcatcagtgattacgggctgtcgcaaaacctcggcatcacccggaaggaagcgggcgcttttattgaccgctatttggagagcttcccgggcgtcaaggcgtatatggaagagtcggtgcaggaagcgaagcaaaaaggatatgtcacgacacttatgcagcgccgccgctatattcctgagctgaccagccgcaacttcaacctgcggagctttgcggaacggacggccatgaatacgccgattcagggaagcgccgccgatattattaaaaaagccatgattgacatggcagctgagctgaaagaaaaaaacctgaaggcgcgactgctgcttcaggtgcacgatgaattgatttttgaagcgcctaaggaagaaattgaaatattagagaagctggttcctgaagtgatggagcatgctttggcattagacgtgccgctgaaggcggattatgcttcagggccgtcttggtacgatgcaaaataaacagagaaaaaggaagtgatgattgtgccggaattaccagaagttgaaacggtccggcgcactctgaccggtcttgtgaaggggaaaacgattgaatcggcggatatcagatggccgaatatcatcaaaaaacccgccgagccggaggaattcgcgcggcagattgcaggagaaacaatccgatccatcggaagaaggggaaagtttttgcttttccatctggatcattatgtcatggtgtcccacctgcggatggaggggaaatacggtcttcatcaggccgatgagcctgacgataaacatgtgcacgtcgtgtttcacatgacggacggaacacagctccgctaccgggatgtccggaaattcggcacgatgcatttgtttgcgccgggagaggaattgaatgcattaccgctttcacagctcgggcccgaacccgatgatgaagcatttaccgctgcttatttaaaagagcggcttgtaaaaacgaaccgcgcggtgaaaacagccctgctcgaccaaaaagcggtcgtcggcctcggcaatatttatgtcgatgaagctttattccgggcgcgtattcatcctgagacaaaagcgaacagtctgtcagacgggcagataaaaacgcttcatacagaaattaaagacacccttcaggaagcgattgacgcgggcgggagcaccgtccggtcttatatcaattctcaaggggagatcggaatgtttcagctcaaacattacgtatacggcaaaaaggatgaaccgtgcaaaacgtgcggcacgatgatttctaaaatcgtggtcggcggaaggggtacgcatttttgcgcccgctgccaaaaaaaatcataaactgaagcggttcaagcaggcggcagcagaatgacttttttctaacacagttgatgacctttctccatatatatattgtgattcacccaataggcatatgtcacaattgccgatcaagagaaagggagaaacggatatggagattgtttctttgctgcttttggcttttgctgtcagcttggacagtttttcagtcgggtttacgtatggtttgagaaaaatgaaaatcccgttcaaagcgattgccgtgatcgcttgctgttcagcctctgtgatgtttatatccatgctgatcggccattttctgacaaagatttttcccgtatccgtcacggaaaaactgggcggactgatcttaatcggaatcggggcatgggtcatctggcaatttttcaaaccggctaaagagccggattacttattgcatgaaaaaacgttacttaatcttgaagtgaaatcgctcggcatcgtcattcatattttgaaaaaaccgaccagcgccgatattgatcaatccggaaccattaacggagtcgaggcgcttctgctcggtatcgccttatccattgacgcgtttggcgccgggctgggagcggccattctcggcttttctccggttatgatgagcgtgactgtcgggctgatgagctcgctgtttgtttcactcggcataaactcggggcatttgctttcaagatggaattggatagataaaatgacatttttgccgggagtcctgctgattatcatcgggatttggaaaatgtaagaaggagtgggctttttgagcttggtcatcggtttaacgggaggcatcgcaagcggcaaaagcacggtagcgcgtatgctgatcgacaaaaaaataacagtcattgatgcggatgtcatcgcaaaacaggcggtggaaaaaggaatgccggcttacggacaaattgtggaagcattcggaaaagacatcctgctggaaaacggcgatattgacagaaaaaaactcggttctatcgttttcactgacgaacagaagcgtctgaagctgaatcagatcgttcatccggcggtgcgtgcggaaatgctgaaacagcgggatgaagccgttgcgcgaaaagagcagttcgtcgttttggatataccgcttttgtatgaaagcgggcttgattatcttgtcggcaaggtgctcgtcgtcaccgtaccggcagacattcagcttaaacggctgatagagcggaattcccttacagaagaagaagcgatgagccggataacgtcgcaaatgcctttagcggataaaacaaaaaaagctgacgccgtcattgataacagcggcagtcttgaatatacaaagcaccagcttgaggaagtattgagcggctgggcataaacaaacaccgttcggaaagccgaacggtgtttttctggttaaaaatcaaaattgtcaggatcaggaccgacacggagattttcgttcagatcatcaatccgcttcatatcgtcagctgacagttcgaaatcaaagacatttgcattttcttcaatacggtgttttttcgttgatttcggaatggtgatgacaccgttttgcaaatcccagcgcaaaatcacttgggcggctgatttgccgtacttctcagcgatttcctgtaagacggtgtgatcaagcagctgaccttgcatcaatggcgaccacgcttcaagctgaatgccttgttcagtgcagaaagcaagcagttctttctgtgtcagacgaggatggtactccacctggttgatcatcggcttgatttccgtctctttcatgagatgtttcagatggtgaatttggaaattgctgaccccgatcgccttaatgcgtccatccctgtagagggtttcgagcgcccgccacgcatcgatgtactttccttcgacaggccaatggatcaaatataaatccaaataatctaaaccgagtttttctaagcttgtgtcaaacgcttttaacgtttcttcatatcctaaatcggcattccacacttttgacgtgacaaaaatgtcttcacgttttaatcccgcttcttgcagcccttggcggatgccttcgccgacaccttcttcatttccgtaaatcgcggcggtatcaacgctacgatagccgtgcaccaatgccgttttcaccgcgttgacgagttccgcgccttcctctactttgaaaactccgatgccgaaccaaggcatttctactccgttatgcaatgttgcttttgcttgtaaatgtgttgtcatgtatatattcctcctattagttgtctgttgaaacaatcaaaatgcgctgaagaaaaactcacctcctttcaagggcagtgcgatcccgcttttcaagcttcctgctccatccggttaatacgaccgcgctgagcaccatcagcgccccgatccaagcggtatgaatgattccgattgagtctgtaatgattccgccggcaaacgagccgatcgcgatcccggcattaaatgccgcgatatttaaggctgatgctgtatcaacggcgcttggcgcaaaacgttcactcagcatcacgacatatacctgaagccccggcacattcataaacgccaacagccccatgaaaataatggtgatcagcccggctgttttaaacggcgcggtaaaagtcagaacaaacagcacagccgcctggacaatgaacatataaaacaaggctttcagcggatttcggtttgataaacggccgccaatcatgtttccgatggcaatcgcaattccgtaaacgagcaggatggccgcgacggtttctttctgaaaaccggttacctcctgaagaagcggggataaatacgtaaacacgacaaacgttccgccgtagcctaacgccgtaatcataaataaaagcaataaccggccgtttgtgacgagtttgacctgctcggcaaatgcggttttcgtccctttgcgcaaatgtgacggaacgagaagcgcgtttgtgaggaatgcgatgattcctaccgccacaatcacggcaaatgcaatcctccatccgaattgctggccgagataggtgccgaacggaacgccggtcaccgtagccaccgtcagccccgtaaacataatggaaatcgcgcttgctcttttatgctccggcacgatattggcggcgattgttgccccgattgacatgaaaatgccgtgggaaaaagccgaaataacccgtgccgccagtaatatgccgattgaggaagcgctcgctgcgagtgtatttccggcgataaaaattaacatcacccagagaagcagcgttttccgcgacatgccggatgtgagagacgttaaaaccggcgcgccgaatgtcacgcccagagcatacatggaaacggtaagtcccgccgttgtcacaggtatatgcagatcttgagatataagcggcagcagcccgacgctgataaattcggttgtgccgatcgcaaaagcgctgacggctaatgccagcagcgctggtaaatagctttggcgatgtgaagacatctgttttcctccttgaacgataatgtatggttgaaatgatgccgggtaaacgatataagtataagagtacattccttttcagccggcaaatgtcattatgatcgatagaagtgtcattgaaaagaacgtacttttaagtgccataggcactttttagttcctatagatgaggaggaattaccgttgctgaagaaaaaatacaatatatccgtagaggcggcgcttgaagtgatcggcggaaaatggaagtgtgtgatcctctgccacctcatgcgcgggaaaaaacggacaagcgaattgaagcggcttatgccggacatcacccagaagatgctgacacagcaattgcgggagctggaagctgacggcgtcatcaaccggatcgtgtacaatcaggtgccgccgaaagtggaatacgagctgagtgaatacgggcacagtctggaaagaattttaaacgcgctgtgcgactggggcgcgatgcatattgctaaacggtacggcgaggtgtcttccgttttagaggacagcattttaaatgacaaatttaaagaaccgggacaaatataagaaaaaagcaggcagcctgagacgctgatcctgctttttttatggaagaaagatcattttatatgcaaaaaaaccgattgaacaacatattgatcggtataagggtggatttttatcaagttgtactggcggatttcttttaatgtgttatactatatataaataaaggtaaattagagtggcatattaaaaaggggtgacctgagcatgaaggtaaaagtagcaatcaacgggtttggaagaatcggaagaatggtgttcagaaaagcaatggaagatgatcaaattcaaataacagccattaatgcaagctatcccccggaaacgcttgctcatttgataaagtatgacacaattcacggcaaatatgatcaagaagttgagacctccgacgacagcctgatcgtcaacggaaaacatattatgctgttcaaccgccgggacccgagagagcttccgtggaaagaatgcggaatagacatcgtcgtagaggcaacggggaaatttaattcaaaagaaaaagcgatgagccatattgaagcaggggcgaaaaaagtcattttaacggctccgggcaaaaatgaagacgttaccattgtcatgggagtaaatgaagagcagttcaatcccgatgaacatgtcattatttcaaatgcatcctgcacgacaaactgtcttgcgccagtcgtcaaagtgcttgatcaggaattcgggattgaaagcggcctgatgacgactgttcacgcttacacgaatgatcaaaaaaatatcgacaatccgcataaagatctgcggagggcgagagcgtgcggagaatccatcattccgacttctactggcgccgccaaagcgctgtcgctcgtgctgcctcatttgaaaggaaaacttcacggtctcgctttgcgtgttcccgttccgaatgtgtcattagtggaccttgtctgcgatctgaaaacagatgtgtcggccgagcaagtgaacgccgctttccaaagagccgcaaaaacgtcgatgtacggaattcttgattattcggatgagccgctcgtttcttcggattataatacgaattcacactctgcgatcatcgacggtctgacaacgatggtgatggaagaccgaaaagtaaaggtgctcgcctggtatgacaatgaatggggatattcctgccgggtcgttgatcttatccgtcacgtcgccgcgcgaatgaaacacccgtcagctgtgtagactaaagatcatggacatttgttagaaaaaaacccttaacggcatattcgcaaaaaacacaccttgcaaaataaacttaaacacagtatactatctttcgtgaacttcttgctcgtgactgcttcggaattacttaaagggttaggacctctccggactaactttcccccgtggtaaatggccgggtcagttctcggaaattcacttttttaattcttgttaaggggggtccatgattatggaaacaatggggcgtcacgtcatctccgagctgtggggatgcgattttgataagctcaatgacatggattttattgaaaaaacgtttgtaaatgctgctttgaaatcaggagctgaagtgcgcgaggtcgcatttcacaaatttgcaccgcaaggcgtaagcggagtcgttattatctctgagtcacatttaacgattcacagttttcctgaacacggatatgcaagcattgatgtttatacttgtggagacctggatcctaatgtggctgcggattacattgcggacgcattacatgcagatacaagagaaaacattgaaataccgagaggaatggggcctgtacagattaaacaggcacaagcgaaagtactgtaattttcaaaacgcaaacacaagggagctaagctgaaaaagccattacgcgctttgaagctgatgctccttttctaatgtaaaaaaacagcattgctttttctttaagcattttttttgtaaaatagaaaagataaggccggtctatcggctctcccaacaaataggctcatcctagaaacgttggcgggcatttaccggaagcttgcgaaccgcattacagcaacgaaacagatgggagctgatccaatttgaaatgtccttcatgccagcacaacggttcccgcgtacttgattcacggcctgcggacgaagggaaatcaatccgcagaaggcgggaatgcgaagcctgccattaccgcttcactacatttgagaagtttgaagagatgcctctgatcgtcgtgaaaaaagaaggcgtccgggaagaattcagccgtgaaaaaatgctgcgcgggttaattaaagcttgtgaaaaaaggcccgttcctttaaaaacattggaagacatgtgctttgacattgaaaaagagctgagaaaccaaggtgtatctgaagtcaaaagcgaacttgtcggagaaatggtaatggaccgtctggcgaaaatcgatgaggtgtcttatgtccgctttgcctccgtctaccggcagtttaaggatataaacgtgtttatcgatgaattgaaagatttaataaagaaagaacgctgagagagctaagagattgtgtctggctcttttctcatgagcaaaattggcatttgatagatcgcagaaacggtgtaaaatgagagtagaaacatatcggaaggtttgagaatcatggctgactattggaatgacgtattgcctgtagatccttatacggtcaaaagccgttcgcttcttcaggatgtcgacagacaggttttgacacatctgtaccagccgctgatcggttcttttgcattctccctttatatgaccttatggggggagcttgagcagaaccgcttgtggggagcggaatccacgcacaggcagctgatgggcatgatgcagtcaaatttaaaaaagattcatcatgaacagggaaagcttgaaggaatcgggctgctgaaagtgtatatccgggagtccgagcagaaagagcggatgtttatttatgagctgctgcccccgctcagaccgaatgatttttttgaagacggcatgctgaatgtctttctttataacagagtcggtaaaacgaaataccagcagctgagacaattttacacgcacccttccgtcggcgcggacgcaagggaaattacccgtccgtttaatcacgcttttgcctcttttcagccgagtgaatggaaaatgacgcctgatatggaagaggcgatgaagctccccgaggactatgagacggcgtctgtcggacaagcgccttcctatacggtgacggaggaagtatttgattttgagcttttcatggcgggactgtcagaaacgatgataccgcgtaaatcaatcacgcaggacgtgcgggagagcattaaaaagctttcatatttatacggaatagatcctatctccatgcagcacgtcgtcatgaccgcaattaatgaacaggatacgataacggccgaagcgctgaggaaagcggccagcgactggtaccaaattgaaagaagcggtaagcttccggaactgattgataaaacacagcctgtcactttgagagaaaaccggacggaaaaggacgattcattgaacggcgaactcattgcacagcttgagaccatatcaccgagaaagcttcttcaggacattgcggacgggaccgagccgtcaaaagccgacttgcagattatcgccgatattatgttcgaacaaaagcttgagcccggcgtcaccaatgtgctgatttattatgtcatgctgaaaacggatatgaagctgtccaaaaactatatccaaaaaatcgccgcccactgggccagaaagaaagtcaaaacggtacgggaagcaatgaagctcgcaatagaagagcacaggcaatatcttgattgggcggacggcaaaacaaacggcgcggcgcgcggtaaaaaaaccgtccgggaagaaaagcgccctgattggatgaaagaagaagaaaccgggaagaaacaagaacagccggctctttcggcgcaggatcttgaagaacagaagaaaaaaatgatggaagaaatgaaaaaactgaaaaaatactctgcctattgagacagagaagcggggtgatattgaatggaaccgatcagccgatccttagaaggcgtgacgaaaagacctgactttcaaaaacgcctggaacgaatgcaggagcaagtcatggccgacgaagacgtccaggcttttttgaaggaacagaaagatgtaatcaatcaaagcatgattgacagagggttaaataaactgtacgaattcgttcagcaaagcaaacagtgcgccttctgctcgaaagacagccggacgaacagcctgcttgaaggctatcatccgaagcttgtgatcaacgggcgttccatcgatattgaatattacgaatgtccggaaaagagaaagctcgaccgccagaaaaggcaaaagtccctgatgaagagcatgtatatccagcaggatcttctcggcgcgacgtttcagcagatcgacattaccgatccgagcagagtcggcattttccagcatgtgacggattttctgaagagctataatgaaacgggaaaaggcaaagggctgtatctgtacggaaaattcggaatcggaaagacatttattttagccgccattgctaacgaactggcggaaaaagagtattcatcaatgatcgtatatgttcccgaatttgtcagagagctgaaaaactcgctccaggatcagtcattggaggcgaaactgaatatggtgaaaacgacgcccgtactgatgcttgatgacatcggagcggagtcaatgacaagctgggtcagagatgaggtcatcggcaccgtgcttcagcacagaatgagccagcagcttcccactttcttctcgtctaatttctcacctgacgagctgaagcatcattttacgtattcacagcggggagaaaaggaagaagtaaaagcggcaagactgatggagcggattttatatttggcttcgcccgtccgtcttgacggggaaaaccgccgccgttcatgatgccggcgtccaatgggaaggatttgagggaatgaggaataagaaggctgtcacttgggctgcggctgcggcgggagcgggccttttgctgtgggcaaaccgcaaatatctgaatctgtcgcctaaggagatacggctgtgggtgttatcgttcggtgtttttgcgccgcttgtgtttatcggaatttccatcgtcaggccttttgtgctgtttcccgtatcaatcgtttccgtcgccggaggattggcgttcggcccgtttttcggcaccgtgtatacgctggcgggctcaatgggcgctgccgccgcgtctttttttgcggcggggctgtttgcctttaatgagaaaagccgtcatggaaaaatggaagccattcaaaagcagatgaaaaccaatggcttcttttatatttttatcctgcgtattctgcctgttaactttgatgtgatcagctatgccgcgggcctatcgaaagtcaggccgatgacgtattttttggcgaccgcagcgggcatcattccggggacgatcgtcctgaatgtgctcggcgcgagctttatgtccggcaatgtgctgaccgtactcggcgtgatctgtctttacatcgtatttttatcgcttcccgttatatttaaaaagaaggtgcgccatttgttcggcggtgaaagctaacctttacgtctattttaaaaacatcccccatatacttgtaacagatgccgtaaggggggacaaatatgcttgaagtgatctttgaagatgaccacgatactgccgcttttttacatctcattcagcaatcggacgaccggagacattttattgtccgtgaaggcataaaaaaagtcggaatcgcaaggtctgaaacggctttttgcgttcagcgctttattgagccgatacttgtcaggttttttttggaatgcaaagaagacgagcatatgctttcgcttattgaggatgcatactgcttcaccgatcaggatgaacagcagcaaatccttcagcttgcacacagcattatggaaggagagcttgatgatcatccgttcgagccgaagaaagagccgcgcacacagtttatttcagatgcgctccagacgatttcacttgatgcgggtgttttttccgtgcgttcgtttcagacgttccggctcggcaggtattatgagcggctcagagaatacgcggaggctgcgatagatgaatatcggatggaacaggaatatcaaaactttatccagtctctgagagattatgtgacatccaatccgccgcggatgaagaaagtccgcatcgtacatgaccgggcttttacgctgtgggagctgcgctatttgtcagaacgggaacagaaaaaatacatagacagacggtttgtgcgggagcacccgatgtatatagattcccatctccttgcgccgctgatctccattgcgcctgagacggtagaactgtatacggacaaaccggagcatatgatgtccagaacgattcaaaacgtgtttcaggagagggtacgcctttttccgctgggcgcatttgcagccgagaagacggaaggatagccgcacggacggccttgtgtaagcggcagggctgtctgtgcgaaatcagacggaaaaccgagttgcatttttctcacagacattttataatacataaaagattaatgattgctacacgtattgataaggacatgaagcattgataccggctttataagagaggagagcctaggctgaaagctttccagctatggatcattgtctttaccgcctttgaacttcagctgtgaacgccggaagaagcgccagtaatagctgacgggaactcccgttacagagtttagagccgcaggtgccgaaacaatcggccgcgcggaaaaaagggtggaaccacgattccgtttatttaacctcgtccctttcatagggggcggggtttttgatttgcataaaaaaaggagtgacgaagatgtcagatatgatcaacatcacatttccggacggagcggtaaaggaatttccgaaaggaacaacaacagaagatatcgcggcatccatcagtccgggattaaagaaaaagtctttagccggaaaactgaacggacaggaaattgatttaagaacgccgattcaagaggatggtgccgtagaaatcataacagaaggcacagaagaaggtttgaacatcatgcggcacagcacggcgcatttattggcccaggcgattaaacgcatttataaagatgtgaaattcggagtcggccccgtcattgaaaacgggttctattatgacattgaaatggagcaggcgctgacgccggatgaccttccgaagattgaaaaagaaatgaaacgcatcgtcggtgaaaatctgccgattatccgaaaagaagtgagccgtgatgaagcaaaagccatgtttgcggaaatcggcgataatctgaagcttgaactgctggatgccatccctgaagacgaaacggtctccatttatgagcagggcgaattttttgacctgtgccgcggcgtgcacgtgccgtctacaggcaaaattaaagaatttaagctgctgagccttgcgggcgcatactggcgcggcgacagcaaaaaccaaatgcttcagcgcatttacggcacggccttctttaaaaaggatgacttgaaagagcatttgcggatgcttgaagaagcgaaagagcgtgaccaccgaaaactgggcaaagaattaaaattgttcgccaactctcaaaaagtcggacaaggcctgccgctctggctgccgaaaggcgcaaccatccgccgcgtgatcgagcgctacattgtggataaagagctgagcctcggttatgagcacgtctatacgcctgttctcggaagcaaagacctgtacgaaacatcgggccactgggaacattatcaggaaggcatgttcccgccgatggaaatggacaatgaaacactcgtgctccgtccgatgaactgtcctcaccatatgatgatttacaaacaggacattcacagctaccgcgagcttccgatccgcatcgcagagctgggaacgatgcatcgttatgaaatgtccggggcgctttcaggtcttcagcgcgtacgcggcatgacgttaaatgacgcgcacattttcgtccgccctgaccagattaaagaagaattcatccgcacggtccgtttgattcaagacgtatacgaagacttcggcctgagtgattacacattccgcctgtcttaccgcgatcctgaagacacggaaaaatattttgatgatgatgagatgtggaacaaagcgcaatccatgctgaaggcggcaatggacgaaatcggccatgactactatgaagcggaaggcgaagcggcgttttacggccctaagcttgacgtgcaggtgaaaacggcgatcggcaaagaagagacattgtcaactgtacagcttgacttccttcttccggaacgctttgatctcacttacgtcggagaagacggcaaacagcaccgtcctgtcgttattcaccgcggcgtcgtgtcaacgatggagcgtttcgttgctttcttaatcgaagagcacaaaggcgcccttccgacatggcttgcgccggtgcaattccaagtcattcctgtatcaccgtccgtgcatcttgattatgcgaaaaaagtgcaggagcgcctgcagcgtgaaggcctgcgtgtcgagcttgacagccgggatgagaaaatcggctataaaatccgtgaagcgcaaatgcaaaaaatcccgtacatgcttgtggtcggtgaccaagaagcggaaaacggcgcggtaaacgtccggaaatacggcgagcagaaatcagaaaccgtctcattggacgattttgtgaaaaaggctgtagccgaagcgaaaaaataaccggaaatacaaaaaccccgttcattcagaatggggtttttttgcgtataaaattatctttctttttgtttctctataatcgcaaacagctcgtgaagatcgctgatcacgtaatcaggcgcaatgtccgtatcatttttcttttgcgtccggtttacccagactgtcgtaatgcctgcccgtttcgctcccaatatatcagtattgaggttatctccgaccataatggcgtcttcttttttcaggttcaggaggccgaggcaatgttcgaatatggaggcgtcgggtttcccttttccgaaagcgcctgagatgacgatttcattaaaataaggcgcgagctcaggaacgccggcgagtttttctttctgcaggctgggatcgccgtttgtcagcagaagcaattcataaacacctttcagcttatcaagcaccgcaaacgtttcatcatacacgtacggacgctgtctgcgttccgccgcgaaaaactccgccaaatattcgccgtaagccgcatcttctataccgacgctttttaagccgttcgtccaggcgtttcgtctgtattccggcgctatccgattcagctgtttaaatccttcgctgaccggctcggaaaaattcgcccataatccttcaaacggattaatgccgatcatgaccgtataaggataggtttcgtatgacatatacaattcccgtgccgctttccgaaccgcatcttcaaatgtatgcgggtcaaggccatattttttttccgcttgtaaacatgtttccctgaatgttgttctgacgcttttttcatcccataacagtgtatcgtccaaatcaaaaaatacggctttcatgatcttctcctctttgttatattctgaaactctctgccgcaaggctcccgtttattctacaatagatacatagactgtgaaagatttgttttcagatgatttgaaaaaaacaggcaggtttgtgtcagattctgtctcaggctctaaaacgtgataaaattaaatttgaaagaacaggtgaaaagtatgctgcatttgatcatcatgatgctggaaagagtcggaattatcgtcatattgggatttgttctggctcataccagattgttcagacaggcgctccagcagcctgagagctataaaggcaaagcggtgctgatttcaattttctcgctgttcagtatcatcagcaactatacgggaatagaaattcagcggaatacaatcatgaataatgactgggtgtttcaaattaatccgtccggttcaattgccaatacaagaattatgggcgttgaaatcggcggactcttaggcggcccgtatgtggggatcggcgtcggcatactggccggcctgcatcgtttatcactcggcggcgcgaccgcagtcagctgtgccgtctcatccgttttagcgggcattttgtccggctggatcggacggtatttcagaaaacgctatgcgatgccgacaccgcgggtggccgcgcttgtcggactcggaatggaatcgctgcaaatgctgctcatcctcttgatggccaagccgttttctgatgcttggacgcttgtgagcatcatcggcatcccgatgatattggtaaacgggtcagggacttttatttttctttcgatcattcagtcgattatccggaaggaagaacgggcgagagcccttgaaacccacagggtgctgatgattgccgatcagacgcttccgtttttccgccaggggctgaatgaaagctcatgcaaaagcgtcgccgccatcattcacaggcaaacaggaacggacgcggtatcgcttacggataacgaaaagattttggcgcacgtcggcgcgggtgccgaccatcatattccgtctgaaagcctgatcaccggattgtcaaaacgcgtcattaaaacgggtcatattatgaaagcgacatcgaaggaagaaattgaatgcacgcacgatccctgtccgctgcatgcggcgatcgtattgccgctgacgtcaaacggcaaaacgatcgggacgttgaaaatgtactttaaaagcccgtcaggtttaagccgggttgaagaagagcttgcagaaggactcgccatgctgttttccacccagcttgaactcggcgaggcggaactgcagagcaaattgctgaaagacgcagaaataaaggcgcttcaggcacaggtcaatccgcattttctgtttaatgcgatcaatacgatttctgctctttgccgtacggatgtggaaaaaacccgaaagcttctgctgcagctgagcgtctatttccgttccaatctgcagggggcaaggcagctgctcatcccgctttctaaagaactgaaccatctgcaggcgtatttatcattggagcaggcccgttttcccgggaaatataaaatcagtcttgaaatcgaacgcggtttggaggacatcgaaattcctccttttgtgctgcagattctcgtcgaaaatgcgctccgccatgcattttcaagaaagcaggacagctgtgccgtcaatgtcagcgtggtatccgccggtcagtcggttttaatgcgggttggagataacgggcggggaattgatccggaattgctgtccgtgctcggaaaccgtccgctcccgtctaaagaagggacgggaaccgcgctttacaatttaaatcagcggctgatcgggctgttcggccccaaagcagccctgcgattggaaagtgaggccggcaaaggtacggacgtatcttttgagctgcctttgaaactgatgactaaaggagaagaacatgctgaaggtgttaatcgttgatgatgaaatgctggcaagagatgaattagcttatttgctgaaacggacgaatgaagtaagtgacataaacgaagctgaaaatattgaatccgcttttgacagtatgatggatcaaaaaccggatctgctgtttttggacgttgatttgtcaggagaaaacggatttgacattgccaaacggctgaaaaacatgaaaaatccgccggccgtcgtttttgcgacggcgtatgaccaatttgctttaaaagcctttgaagtcgacgcgctcgattatttaacgaagccttttgatgaagaaagagtgcgccagacgatcagaaagtttaaaagagtgaagcgggacagggcaggagccgtctcagagcagccgtccgcagccggagcgcataaactggctgtatcagccggtgaatctattgtcattttagatacgaaggacattattttcgccggcatggaggacggacacgtttccgttaaaacgtttgccgcgtcttattccgttcatgaaactttggcggtcattgagaaaaaactgcctgatacgggtttcttgagagtgcaccgcgcgttcatcgtgaatacggagcatattacggaaattcatccgtggtttaattcgacgtacaatcttatcttaaaagacggctctaaaattcccgtcagccgtacatacgccaaggacttaaaaaagctgcttcatattatatgaggcggcttttgcatttcagcagccgtttcttgcatttcagaatgaatattcagccgtttgttatgaaagcgctttaaaaggcgatttctcttttataatgaacctaacaaagagaaagaggtgaagaaaatgagtgcgaaaaaagtgtacggatttctgacacaagcatttatttttgccgtaattatgctcatatctaatgggattgcagcgattgtccccattcctatacccgcttccgtagtaggtttggtgttattatttgtcctcttatgcctgaaagtgattaagcttgaacaagtagaaacgctgggaacatcattaacgtcactcatcggatttttatttgtcccgtcgggcatctccgtgatgaattcacttggcgtcatgcagcagtacggcgtgcagatcgcactcgtcatcttactcgctaccatcattctgttaggggcgacgggccttttttctcagctgatcttgtctgtcagccaaaaacgtcagaaggcagctcctgaaaaacaaacggtgcgccgttccaatcaggaaaaagaacttgtgcagcattaggagggaaatcggatgagtccatatttcggtattgtcgtttcacttgcggcctttggcatcggcacgtatttatttaaaaaaacgagaggctttttcctcttcaccccgctgtttgtcgcgatggtgcttggaatcctttttctgaagctcggcggtttttcatatgaagattataaaagcgggggagacattattaaattcttcctggagcccgcgacgatcgcttttgcgatccctttatacaaacagcgtgacaaactgaaaaaatactggtggcagatcatgtcttctatcattgtcggctctatctgctcagtcacgattgtctatttgatcgcaaaaggcattcatcttgacgcggccgttatgaaaagcatgcttccgcaggcggcgacaacggcaattgcccttccgctgtcaaaaggaatcggaggcatcaccgacatcaccgctttcgccgttattttcaacgccgttatcgtctatgctctgggcgctctattcttaaaattgtttaaagtgaaacacccaatctctaagggactggctctcggcacatccggacacgcactcggtgttgcggtcggtattgagatgggggaagtagaagcggcaatggcaagtatcgcggttgtcgtcgtaggagtggtgacggtgctggtcattccggtattcgttcagctcatcggaggataaacccgggtcatagacccgggtttttttattgtgttggcacgtccgcgtgcggcaaagaacgaaatttcacatttttccttgcgctcgccccggcatcgtgttaaaatgaaaaagttgatccggagaagtcattcttgactaatgatccggtattgtgtagaatagttattgaattgaatataaatcacaagcagaggcacccgcttctcacctgattgacacattcatgtagttggcaggttgaccgtacatttttatttatgcagatgttcgtagtgtgggtgtgttgtcatgcccgcactttttgtttgcctgcagaatgcagtcaacaagcgttgtgaatcaattcgaagaaactatggaggtggctcattattagcaaagatcaattggttaatgagggtatccgtgcacgtgaagttcgtctgatcggacaaaatggcgatcagctcggcatcaagtcccgtcaggaagcacttgaaatcgccggccgcgcaaatcttgaccttgtgttagttgcagcaaatgcaaaaccgcctgtctgccgcatcatggactacggtaagttcagattcgagcagcagaaaaaggacaaagaagcacgcaaaaatcaaaaaatcattaacttaaaagaagttagattaagtccgacgatcgatgagcatgactttaacacgaaattgcgcaatgcgattaaattccttgaaaaaggcgataaagtgaaagcttctatccgctttaaagggcgcgcaatcactcataaagaaatcggccagcgcgtattggaccgtttctctgaagcatgtgcggaagttgcgacagtcgaaacaaaaccaaaaatggacggccgcagcatgttcttaatgctcgcgccgaaaaacgaaaagcaataaggaggaaatcccatgccaaaaatgaaaactcaccgcggatctgctaaacgttttaaaaagacaggttctgggaagttaaaacgttctcatgcatacacaagtcacttattcgccaacaaatcccaaaagcaaaagcgtaagcttcgcaagggtgctattgtgagcgcaggagacttcaaacgcattaaacaacagcttgccaacatcaagtaatcggacaaggaacaattaggagggaaatctaatgccaagagtaaaaggcggaactgttacacgtaagcgtcgtaaaaaggttcttaaattagcaaaaggttatttcggttcaaaacatacattatacaaagtagcaaaccagcaggtcatgaaatcaggaaactatgcattccgtgaccgccgtcagaaaaaacgtgatttccgtaagctttggatcactcgtatcaacgctgctgcacgtatgaacggtctttcttacagccgtttaatgcacggtcttaagctttcaggcatcgaagtaaaccgcaaaatgcttgctgatcttgctgtaaacgatcttactgctttcaatcagcttgctgatgctgctaaagctcagttagacaagtaagttgaaaaagccgctctctttccgggagcggtttttttacgtaaagggtgacaatcatggctctcctcatttacgccgtgttgataaacggatacggcttttggatcatgggcgctgataaaagaagagcaaaggcgcacaggtggagaatatcagagaaacgaatatggctcacagccgccatgttcggctcactcggcgtatggatcggcatgcgcaccttcaggcataaaacgaaacacaaatcctttttatacggggtgccgctgctttttctcactgaagccgcccttgtgctgatgtatttggtgtataaaacataaaaagcaggagagcttatcgctcgcctgcttttttcgcttttttgatgggctggtcccaatcaatcttgcaattcggataccgctccaatacctttttttcgacttcttcaaaatcacctgcagaaaagcggttcagcttttccggattttcggtccatacaaatatcgtatgaataaacagcggatgatctttggaagggatatgcttttctccttcaaagagcactcctttataagtaagctggagattttttcgcgtgtttttctgttcgtcaataaaataaaaattctcttttgattgcgccagtctgagccttcttttcgggtttgcgtagaatttgacgcccatgtaaataaaataaataagaagtgcaagcaagacaatcctcaatactgtaatggccatatgtgtgaaggcacctcctcacctttgtcatgatctgatgtaatacgaaaaacaaaacaaaaggtttcatttttttaaaagaaatagataaaaacatttacccgtttttcaggcgaattaatcgtatgcttcagcattggttttgtataataagaagggtagtgaaaaaaaggaggtttattgatgacaaaattagatgaaacgctcaccatgctgaaagcgttaacggatgcaaaagggataccgggaaatgagagagaagtaagacaagtgatgaaatcatacatagaaccatttgctgatgatgtcacaacagaccggctgggaagcttaatcgccaaaaaaaccggcaaagaaaacggtccgaaaatcatgatctcagggcatttagacgaagtcggttttatggtgacgcaaatcactgataaaggctttctccgctttcaaaccgtcggcggctggtggtctcaggtcatgctggcccagcgcgtcaccgtcgtgacaaaaaaaggggacatcacggggatcatcggttcgaaaccgcctcacattctgcctcctgacgccagaaaaaaagccgccgatattaaagagatgttcatcgatatcggggcgtccagccgtgaagaagcaatggaatggggcgttcttccgggtgaccagattgtgccgtattttgaatttacagtgatgaacaatgaaaaacatttattggcgaaggcatgggacaaccgtatcggctgcgcgattgccatcgatgtattaaaaaatctgaaaaacagcgatcatccgaatgaagtatacggggtcggaacggttcaggaagaagtcgggcttcgcggagcgaaaacagcggcacatacgattcagcctgatatcgcgttcggtgtggatgtcggaattgccggagatacaccgggaatttctgaaaaagaggcgcaaagcaaaatcggtgaagggccgcaaattattctgtatgacgcgtcaatggtatctcacaaagggctgcgcgaccttgtcgtgaacacggcagaagaagcgggaattccgtatcaattcgattccattgccggagggggcacggattcaggttccattcatttaaccgcaaacggagtgccggcgctgtccattacgattgcgacgcgctacattcacactcatgccgctattttgcatcgggatgattatgagaatacggtaaaattgatcacagaagtgattaaaaaattagaccgggaaacggttgaccgtattacttatcaataaagatacggaagaatctgcttttttaagcagattctttttttttgtctgtacaaatataagccctgcgtctacaataagagaagacatagaaaaatctgacaacatgtttttgaaagcgctttaaaaaagggagggtttacaaatgaaaaacagattcagacgcatgatccgcttttcatgcgcagccgttacagccggtctgctgctgatgtcttcatctccggcatctgccgcgttttggggggcatcaaatgaattgcttcacgatccgacaatggcgaaggaaggaaacacgtggtacgctttcggaaccggtttggaaggggagagggggcttcgcgtcttaaaggcgggcagcggcggcgtatggaccgttcagaaatcaatctttacttccccgctgtcatggtggggcaattatgtgccgaattacgggctgaatcaatgggcccccgatgttcaatattttaacggaaagtattggctgtattatgccgtttcttcattcggcaaaaatacctccgcgatcggtcttgcatcatctacaagcctcagttcgggaaactggaaggacgaagggctcgtcatccgttcaacaagcgccaataactacaatgcaattgatccggagctgacaattgataaagacggaaacccttggcttgccttcggttctttttggagcggcattaagctgacaaagcttgataaaaatacaatgaaaccgacgggatcactttattccatcgctgccagaccgaataacggcggagctttggaagcgccggccatcacctaccagaacggctactattacttaatggtgtcgtttgataaatgctgttcaggcgtgaatagtacgtacaaaatcgcttatggaagatccaaaagcatcaccggcccatatctcgataaaagcgggaaaagcatgtcagaaggcggagggacgattcttgactccggcaatgaccgctggaaaggcccgggcggtcaagacattgtgaacgggaatattttagtgcgtcatgcgtatgatgccgaaaacagcggaattccgaagatgctcatcaatgatatcgattggagttcaggctggccttcctattaattgatcagccgggcatgtgtgtccggcttttttacttgcaataaaagattgacagtttgattcctccttaactataataaaattgttcgtacaaataaaaggatagaagttttgttatttatattcgtacgtatatttttaagaatgcaggcgctttattttgataggaaggggaaatgaatgtgcttcagaacaaagaatatgaattttggtttgtaacgggaagccagcacttatacggagaggaaacgctgcagcttgtcgataaacacgcaaagggaatatgtgacggcctcagcggggtgtcatcaagatacaagatcaggcataaaccggttgtcacgtcatctgaaacgatcagagaggttttgcgggaagcgcagtatcaagaaaactgtgccggggtcgtgacatggatgcatacattttcccctgcgaaaatgtggattgaaggtctttccgcttttcaaaagccgatgcttcatctgcatacccaatatcaccgcgacatcccgtgggaaacgattgatatggactttatgaacagcaaccaatccgctcacggagaccgggaatacgggtatatccagtcaagaatggggcagacgagaaaagtcatcgcaggctattgggatgatgaggaagtcaaacatgacatttcgcaatggatgaacactgctgccgcctggaatgaaagcaggaatattaaagtagcccggtttggcgacaatatgcggaatgtggcggttactgacggagacaaagtcggcgcccacatccaattcggctggcaggttgacgggtacggaatcggcgatcttaccgaggtgatgaacaacgtcaccgacggagaaattgaggcgctttatgaggaatacgacaaattgtatgtcatcagcgacgaaacaaaacgggatgaagcaaaagttgcttccattaaagaacaggcgaaaattgaactcggattaacggcctttctcgaacggggcggatatacagcgttttcgacctcgtttgaagttttgcacggaatgaagcagcttccgggtcttgccgttcagcgtctcatggaaaaagggtacggatttgccggcgaaggcgattggaaaacggctgcccttgtgcgaatgatgaaaataatggcggacggagaacaaacctccttcatggaagattatacgtaccattttgaaccggggcgtgcgatgattctcggatcacatatgcttgaagtatgtccgacgatcgcccttgatcagccgaaaatcgaagtccatcctctctcaatcggagggaaggaagatccggcccggttggtctttaacggaatcggcggttcagccatcatcgccagcatcattgatatcggcgggcgattccgtctcattctgaatgaagcggaaggcagggaaattgatcatgatatgccgaatctccctgtggcgcgggtgctgtggaagccggagccatcgctgaaaacagctgcagaagcatggattttggcgggaggcgcccaccatacttgtatgtccttccggcttacggctgaacagatgcttgactgggctgagatggcaggcattgaaagcatctttatttcccgcaataccgaaatacatgagctgaaaaaagagctgaaatggaatgacgtattataccggctgggagggaattgatatggcgtatacgattggtgttgatttcggcacattgtccggccgggcggtgcttgtcaatgtccgcacgggcgaagaaatcgcgtctgcggtaaaagaatacactcatgccgtcatcgaccgcacgctgccgaagacgggtgaaaaactccctcgggactgggcgcttcagcatcctgccgattatatcgaagttctggaaacggcgattccgaacctgcttcaagaggcgggcgctgatccaaaagacgtgatcggcataggaattgactttaccgcctgcacgattttgccgatagacggtgcggggcagccgctttgtatgctgccggaatttgaacgggagccccacagttatgtgaagctgtggaagcatcatgcggctcaaaaacatgcagaccgtttgaacacgattgccgaagacacaaaagaaacattccttaaaagatacggcggtaaaatttcttctgaatggatgatcccgaaaatcatgcaaatcgcggaagaagcgccgcatatatacaaggcggcagatcggattgtggaagcggcagactggatcgtctatcaattgtgcggttcattgaagcgaagcaactgcacggccggctacaaagcaatctggaatgaggagacggggtatccgccggatcatttttttgaaaagctcaacccgttaatgaaaacgattacaaaagataaattaagcggcaccatttattcagtcggggaaaaggcaggaggtttgaccgaaaaaatggcggagctgaccgggcttctgccggggacggccgttgccgtcgccaatgtcgacgcccacgtgtcagtgcccgcggtcggtattacagagccggggaaaatgctgatgattatgggaacgtctacctgccatgtgctgctcggcgaggaagaacatatcgtccccggtatgtgcggggtcgtcaataacggcatcttgcccggatatgcgggatatgaagcgggacagtcctgtgtcggcgaccactttgaatggttcgtcaaaacgtgcgttccgagagactatgagaaggaagctgaggataaacacatagacattcacgagctgctcagcaaaaaagcagctgaacttgttccgggggaaagcggccttctcgcgcttgactggtggaacggaaaccggtcaaccttggtggacgccgatttgacgggcatgatgctcggcatgacgctgcacacgaagccggaagaaatctacagggcattgattgaagcgacggcgttcggaacgaggatgattatcgaaacgtttcgggaaaacggcgttccggtcgaggagctttacgcagccggaggaatcgccgaaaaaaatccgtttgtcatgcagatttatgcagacgtcacaaatatggacattcaattatccgggtctccgcaggcgccggcactgggctccgcgattttcggagcgctcgccgcggggcgggaaaacgggggatactccaatattgctgaagcatgtgcgcatatggggaaattaaaagacggctcttatgtcccggatcgaaaaagagctgagatttatgacagcttatatgcggaatataaagagctcgttcactacttcggcaaagaaaacaatgtcatgaaacgcctgaaagccattaaaaaccgtgattttgcgaaagggggaagccgccatgcttgaagcgttaaaagaagaagtgctcgctgccaatctgaagcttgaggaacataaccttgtcacgtttacatgggggaatgtcagcggcattgacagagagagcgggagaatcgtcattaaaccgagcggtgtcgattacagtgagctgaccgctgacaaactggtcgtcctgaatgaggacggagacattctcgaaggctcgctgaaaccgtcttctgacacgccgacccatctttatctgtataaagcgtttccgtctatcggcggaatcgttcatacgcactcccgctgggcgacgagctgggcacagtccggaagagacatacccgctctcggaacgactcacgcggattactttgaaagcgctataccttgcacgagggaaatgtatgaagaagaaattgtgaaagattacgaatatcatacaggcaaagtcatagccgaaacttttcaaaacgaaccgtatgaacaaaatccgggtgtcctcgtccacagccacggcccgttctgctggggaacggacgcgctgaatgccctgcataacgccgttgtgctcgaaacggtagcggaaatggcctaccattcgcttatgctgaacaaacagctcagtccgatcgacagagtgctgcatgataagcatttttacagaaaacacggggcgaatgcttattatggccaaacttgacgcagccgggtttctgattgatttagacggaaccgtattcagggggcgggagctggttgacggcgcaaaagaagccgttcatacccttcagtcattgggcaaagccgttgtctttttaagcaaccgcggcaatctatcaagagcaatgtgccgaaagaaactgctgggtgccggtatccgcacggatgaacggagcatcgtgctgtcctccagtgtgacggcatcatttttaaagaagcattatcctttgtcaaaggcgtgggtgttaggagaaaaagggctgactgatgaactcgctttagcgggtgtcgccctggcgcaaaacccgcaggcggcagactggcttgtcatctccctgcatgaaaccgtcacctatgaggatctgaatctcgcttttaaggcggcttcctccggcgcgcgcatcatcgccacgaaccgggaccgctcctttccgaatgaaggcggccatgccatggatgtcgcgggaatgatcggggccattgaagcatctgccggagcaaaaactgagcttgtcatcggcaaaccgtcttggctgatggctgaggcggcatgtgaagcgctcggacttccccctgaggaatgcgccattatcggagacagcctcgaatcagatatcgcaatgggcagcctgtacgggatgaaaagcgtattggttctgacggggtcggccaaacttggggagccccgtctatatgaacctgacatcgtccttgattctattaaagacctgacagaattagcgaaggagggaatcctttcatgaaacgttctcctgaggacattcaatccgagtttgacaaggaaggggccagccgctcaccgattcaaatagaagatatcgtgatcggggcgaatgcaaaagaagagcttctcagatttctgcaaaaaaaatgctggaatcatccggtcatcgtctgtgaccggaacacgtacgaggcggcggggcgtctgcttgcggacgaattgagagcaggcgggatcaaagcgtcaaaagtcatcattccggagcatgaagccggggccgccgcggctgatgagaggacattggtctatacgctgatcaatctcgcggaagagacggatgtcatcattgcggccggtgcaggaacgattcacgacattacgcggtttgccgcctgccagcgcggattgccgtttatctcattccccaccgctccgtcagtcgacggttttacgtcggcgggagcgccgctcatattaaacggaatcaaaacgacgattcaaacgaaagcgccgatcgccttatttgcggatacgaatgtattaaaagaagcgccccgttcaatgacagccgcgggcttcggagacatgctcggaaaaataacatcgctggcagattgggagatttcccgcaggcttgcgggtgagccgtactcagaagccggggcgaagcttgtgaaagacgcgctttggcagtgcattgatcaccgcgctgccattgccatgggaacggaggccggcattcagatgctgatggaagcgctgatcgtttcgggtcttgtcatgcttgcgcttgaccactcccgccccgcctcaggaggagaacatcacatctcgcattggattgagatggaaatgctgaaggcaaaacagcctcctattctccatggtgcgaaggtcggctgtgcgtgcgcggtgctgagtgatatttacaaagaactggcttgtcacgaaaagcttgctgaactgccgccgcactttcgcgaggcgattcaatctgcatatgaagggcttcccgacggcaagacaattgccgggtggctcgcatctgcgggaggtcccgcctgtttcgatgagatcggtgtaaaacaggaccttgtcagcgatgcgcttaagcatgcgcacacactgagagaccgttataccggtttaaccatcataaatgaaaatgcagcgctctttgcacatcatttgcatcaatagccgcacagcctaaagtggaaggggtaatgacatgaaaaaaacgaccgctgtatgtttggtgctgatgatgctcttcttgtttaccgccggctgttcacaaaaacggactgccggccggccgggagaaacagagctgacgttttggacgtttaacggtctgcacgaacagttttatcaggaaatggtcaaagaatggaatcagaaatatccggatcgcaaaatcaagctgaataccgttgtttatccttatggacaaatgcatgataatttatcggtttcgctgatcgcgggtgaggggcttcccgatatagccgacgtggaattaagccggttctcgaactttctgaaggggaaggatatcccgcttgccgatctgacgccgctgattgaaaaagaccgcgataagtttgtggaagcgcgtctggccttatacagcaaaaacggaaaattgtacggccttgatacacatgtggggacgaccgtcatgttttacaacatggatatcatgaaaaaagcgggcgttgatcccgcctccattaaaacatgggaagattaccggcgggcagggaaaaaagtgcgtgaagccgctgggaaaccgatgggaacggttgaaacaaacgactccgccacatttctatctatgatttcgcagcaagggtcaggctactacagcaaaaacggaaaattgattctgaacagcaagacgaatacagacacactgaattatgtaaaggacatggtaaatgataaaacccttctgccggctcccggcggcggccatcacagcgaagaatactacggttttatgaatcagggcggggcagcctcagtgctgatgcccatttggtacatgggacggtttatcgattatatgcctgatttaaaaggaaaaatggcgatttaccctatgccggcctggaaagaaggcggtgacagatcagcgggtttaggcggaacagccaccgtcgtgccgaagcaggctgaacatctgaagctcgcgaaagaatttctcggttttgcgaaaggttcgaaggaagggaatataaagctttggacggtgctcggctttgacccgctccgctgggacgtgtgggattcaaaagaattgaaggagaaaaacaagtacacggatttcttccggaacggtacgtcaattttttcctcgctccttgaaataaaagatgagatcaatccgatttatctgcatgaagacttctctaaagcggctgatctcgttgtcagacaagtgctgttcgatgcgctgaagacgcaggaaaaaacacctaaggaagccttggacgaggcggcagagcaattagagaaataggagaagccgccctatttaacagtgaaagcgggggagcttttatgagacctgtaaagacagagacagcgcaaaccgtttctgcagtccggaagaagccgcgccggcgcaatgtgctgtattcaaaaaaagcggcgccttatctttttacggcgccatttatcatttcgtttctcgttttctttttgtatccgattatcagcgtgtttatcatgagctttcaacggatactgccgggagaaattacatttgtcgggttttccaattataccgctcttcttaatccaaccttttatacggcattatttaacacattggaatataccttctggacgctgatcgtgctgattccggtgccgcttcttttggcggtgattctgaattcgaagctcgtcaggttcagaaatgtgtttaaatcggctctgtttgtaccggctttaacatcgacgatcgtagcggggattattttccgtctgatgttcggagaaatgaatacgtcgcttgcaaacgagctgatgatgaagcttggcgcatcaccccaaaactggctcaacaacaaaggtaccggcatgtttttaatggtgctgcttgcgtcatggaggtggatggggattaacattctttactttctggcgggattgcaaaacgtgccgaaagaattgtatgaagcggctgaaattgacggggcgagcacgtggaaaaagttccggcatattacccttccatttttaaagccggtgtccgtttatgtgttaacgatcagtattatcggcggtttcagaatgtttgaggaaagctatgtgctttggcagaataattccccgggcaatatcggcctcacgcttgtcggttatttatatcagcaggggcttgcatacaacgaaatggggtacggggccgcaatcggaattgtccttttgcttgtcatcttactagtcagtcttgtttcactgaaactgtccggttcgtttaaaggggagggataagcggtgcgtaacaatcacatgttttccgtgtacagagtcgcgtttaccttgttttttatcatgctgagcctgttgtatatctttccgatgatctgtctattgctcggttctttaaagccgtcatctgagctgatgcgtatcgggctgaatctgcgccttgatccggatgtgatgagccttgataactacacctatttgttcaacggggggagcatttatttcaaatggttttttaacagcctgctgctcggcgttctcaccacggttctcacgctgtttttttcctctttgatcggctacggactcggtgtctacgaatttaaaggcagaaatattattttcgttcttgtgctgatcattatgatggtgcctcttgaagtgatgatgctcccgttgttcaaattgacggtgggtcttcatttgatcgattcttatacgggagtgattctgccgtttattgtgtcacctgtcgccgtgttctttttccggcaatatgcgctcggacttccgaaggatctgcttgattcagcgagaatggacggctgcaccgaattcggcatttttttcagaattatggcgccgctcatgaaaccggcattcggggcaatgatcattcttcaatctttaaacagctggaataactttttatggccgctgatcgtgcttcggtcgaaagaaatgtttacgcttccaatcggactttcagggctgctgagtccgtacggcaacaactatgacatgctgatttccgggtccgtttttgcgatactgccggtgatcatcatattcttgtttttccaaaaatacttcatttccggactcacagtaggcggagtgaagggatagagagagggaggaaatataatgaaaaaagcggggattacagcagataaagaatatatcatcggtgaagtggacaaacggatgtacggatcatttatagaacatatgggccgagcggtgtatgaaggcatttatgagcccggacacccgaaagccgacaaggacggcttcagaacagacgtgcaggagttaatcaaggaattgcaagtgccgttcatccgctatccgggagggaattttctctcgggctacaattgggaagacggcgtcgggccggtgaaggaccgcccgcggaggctagatttggcatggcagacgacagaaacgaacgaagtagggacgaatgaatttttaacgtgggcgaaaaaagtgaacgccgaagtgaatatggcggtcaatctcgggacgagagggatcgatgccgcccggaacctcgtcgaatactgcaaccatcctgaagggtcatactggagcgacttacgaaaatcgcacggatatgaaaaaccttacggcatcaaaacatggtgcttaggaaatgagatggacggcccttggcagatcggtcataaaacggcgcatgaatacggacggctcgccgctgaaacggcaaaggtgatgaaatggacggacccgacgatcgaattggtggcttgcggaagctcaaacagcggcatgccgtccttcattgagtgggaggccgaggtgcttgagcatacgtatgagcatgtggattacatctcactgcatacgtattacggcaaccatgaaaatgatcttgagaactatttggcgaagtcgatggatttagaccattttattaaatccgtcacagccgtatgtgattatatgaaagcgaaaaaacgcagcaaaaaaacgattcacctttctttagatgaatggaatgtgtggtatcactcaaatgaagcggataaaaaagtggagccatggattacggcccggccgattctcgaagacatctacaattttgaagatgcgctgttgatcggttcactgctgattacgatgctgcagcatgcggacagactaaagatcgcctgtctcgcccagcttgtcaacgtaattgcgcctattatgactgaaaagggcggagaagcatggagacagccgatcttttacccttacatgcacgcctctgtctacgggagagggacttcaatgaagctgctgatcacctccccgaaatacgactcagcggattttacggatgtgccgtatgttgatgccgcggccgtttaccatgaagaggatgaagcactgaccatttttgccgtcaacaaaagcaaggaactgatggaaacggagatcaaactgagagggtttgaagattaccgcatcattgagcatatcgtgctggagcatcaggatatgaaagcgaccaatcaaaaaaacagaaatgaagtcacgcctcactccaacgggacgtcttccgcaaacgccgaaggaataacggctcattttaagccgctgtcctggaatgtcatccgtttatcaggaaaatagcgttccgaaaagccgggcttagtcgccggcttttttttacgcaaaaatcatctactgttatctgataattgtgataatatttagaaaaagagaaaaggggctgggattaaatgaatgcgattacaatcgtcatagcgtctatatgtattctggcgatcgcctatcggctttacggtacctttatgatggtcaaagtattaaaaatcaatgatcagacaccgactccggcccatgtgcttgaggatgggaaagattatgtgccgacgaataagtgggtgtcattcggccaccacttcgcggcaatcgccgctgccggcccgcttgtcggaccgattctggcagctcagttcggctatctgcccgggcttttatggctgttaatcggggcggtgatcggaggagccgtgcacgatattgtcgtattgtttgcatcaatgcggaaaaacgggaaaacgctttctgaagtcgccaaagaagagcttggcccggtggcgggcttttgcacgggtctttccatgctgtttatcattacgatcacgatggcggggctgtccatggttgtgctgcacgcgcttgagaaaaacccgtggggaacgtttgcggtggggattacgattccgatcgcgatgggggtcggcgtctactataaaaaaacgggcaatctcaaactcgcatcaactgtcgggtttcttttgttaatggccggtgttgtcatcgggccgtggctgcagacaacggctctcggggacatgctgacactggatgcgaaaacgcttgcagtggcgcttcctgtttatgcgtttttcgccgcggcgcttccggtttggcttttgctggctccgcgtgactatttaagcagttttatgaaaatcggggtttttgccgctttgatcgcaggcgtctttttcgtcaatcccgccattaaattcccggccgtaacggagtttattcacggcggagggccggtgatcgcgggtcctgtctggccgtttatttcaataacgattgcctgcggcgccatttcgggctttcatgcatttgtcggttccggcacaacgccgaaaatgctggataaatggagtgatataaagccggttgctttcggagcgatgcttgtggaatgtctcgtcggaattatggcgctcattgcagctgccgctcttgagcccgccgactattttgctattaacagcacgcctgaaatattccgcaccctcgggatgaatgtcgtccatctgcctgaattgagtaaagaaatcgggctcagtctggaaggaagaacgggcggcgctgttacgcttgctgtcggaatgacgtatatctttacggagattccgtttttcagtcatttggcttcatacttttttcaattcgtcattatgtttgaagcggtgtttattttaacggcgattgatgcgggaacccgtgtcgcccggtacttgattcaagagtttttcggagaggtctataagccgctgaaaaaaacagactggctgccgggctcgattttctcaagcgcgctcgcctgcctgctgtggggctatcttctgtattcgggcgacatcagctccatttgggcgctgttcggcgtatccaatcagcttatggcgtctgtcggcttaattatcggtgcgaccgtcgtattaaaaatagcggataagcggcgctatatgctgacatgcctgattcctctcgcttatttgtacgtgaccgtcaactatgcgggttattggatggtgcggtatgtgtatttgaaccccgaagcggcgggatacaacgtgctgaatggcgttttatccattatcatgctcattctcgggcttgtgattatcattgcggctgtgaaaaaatgggcgaatgtatggcgtgacccgagtgccagactggaagcttcaatacccggataaatccgcggccgtccgaacattgcagcatcataaaaaagcagagagccgatcggtctctctgctttcatcttatgacaaatccgccgcttccaaaaggtaatccgccaaatgaaccgcgcggacacggcctgttaatccttcgcgtaaaatgccgagctgcatttgcagaaggcatccgggattggctgttacgatgacggcggcctccgtttttccggcggctttcatcttactgtctaatattttcatagacatctctgactctgttatattataaattcccgccgacccgcagcagctgtcggccttttccatttctctgtactcagcccctttaatgcttttcaaaagcgtgcgcggttcctctgacgtatgcatcacattgcggagatggcaggagtcctgatatgtgacgatatgaggagactgcgcccgcaggtttttttgatggaacttcagatcaaccagtacggatgaaaagtctttgagcttccggacgaattgtccggcacgttccgcccatccaggttcatctttcagtaaatgcggatattcctgaagaaaggcgccgcatccgccggcgtttgtaatgatataatcagcgtcaagcgcctcaaaagccgcgatattccgcttggccagttcttttcccatctctttttctccgctgtgcccgtgaagcgcgccgcagcacgcctggccgtccggaaccgcgatttcacacccggccgcctgtaaaagcgccgttgtcgcatgatttgtcgctaaaaacatcgtatccattaagcagcccgagaaaaaagcggcccgtttttggacgggacccgcggcaggaagaaaacgcggcctttccttcatgtctttccgtttcggggcgggcgggagcacttgttccattgtgcgcagatgttcaggcaaaacgcgcagcataccggtttttctgacggcggtctgcagtcccgatctttggtatattccgagaagattcacggctgtctgcatgcggttttgatgagggaaaagcccggtgaaggcggctttccgcaagaggcgcacgcccggcttatgttttttattttgatgaatgatatccctcgcttcttcaagcagctgtccgtaattgacccctgccggacaaacgggctcgcatgcccggcatccgagacacagcgaaagtgagcgctcgacatcttcatccggctcgatcagtccgtcagtgacggctttcatcagggcgatccggccgcgcggcgaatgggattcttgaaatcccgattcgatataggtcggacaggaaggaaggcagaagccgcagcgcatacagttcagcaattcaccttcatccatgcggtttttgaattctgtttgaatttgttgctgctctttagccgttgtcatttcatcaccaccacgcgtttccttgatgaattggcgaatatttttcccggattcagcagattttggggatcaagcgcttgtttgatcgctttcatggcggtgatgccttctgttttcagtttcatttctaaatacggcgcttttacgatgccgaccccgtgttcacccgttatcgtcccgcccagctcaatcgctttttcaaaaatggcggcaaaagctttttcgacacgttccatttcctctgtatttcggatatcggtggtgcacgtcggatggaggttgccgtctccggcatggccgaatgtgcagatggacaggccgtatgtttctgcaatctcgttaatggctttgaccatgctggcaatttgtgatctcggcacggtcgcatcttccagaatcgttgtcggtttcagccgggcaagggctgataatgcggaccgtctggcctctgtaagcgcgaatgcctcttcctcggtttcagccgtttggacggatacggcggctccgtttttacaaatcgcttcgattttttccatatctcgtctgaccgtgtcgatgtcaccgtcctgttcgatcagcagcaccgcttttgcgtcggtcggaagcccgatcttggcgtaatcttcaatgacctgcagtgtcggctgatccagaaattcgagtgtcgccggaatgattttttcagcgatgatggcagaaaccgattccgcagccgcttcaatatgttcatagagtgcaagcagcgtttttttcgtttccggcttcggaaccagctttaaagtcgcttccgtcacaacgccgagcgtcccttctgatccgacgaaaagccgggtcagatcataaccggcgacatcctttgtcagctttcctcctgtgcggatgatatcgcctgaagccaatacggcttcaaggccgaggacataatcccgggtgacgccgtacttcaaaccgcgcagcccgccggaattttcattaatattcccgccgattgtcgatattttcatgctgctcggatcaggcggataaaataaacctttttgttcaaccgcacggatcatatcttgcgtaatcacgcccggctggacggttgccgtcaaattttcttcatcgatttctagaatgcggttcatatgtttgaataaaagcacaagcccgccttcagacggacatgtgccgccgcacaagtttgtgcctgaacccctcggcacgatcggaatgtcatgcctgctgcaaatcgttaatatacgggacacgtcattcgcactgcggggggcgattaccgcatccggcatggcttgcagctgaggagccgcatcataagaatacacaagacggcccgccgccgaatcatcataattctccttcccgaccgtccggatgaacgcttcttttgcctctcgtgaaatcatgttctcccaacctccctgataagaaaagcgttttcatttaattgtaaagaaaaacgattccgcacactatggagaaacatatgaaaaatgttgatatgattacgtgctttttgtatgttgatctaaaaagcgcagcgccaaataaaaagccgctatgtcttcagggcggtccagcttcatatttgtcagtgattccagtttggaaagacggtagcgcaatgtgttgatatgaatatgcatgtcgtcggcggtgcgctttaacgataattgccggtcgaaaaaggcgcgcagcgtatccagaagttcttcccggccgagtacatgctcgagaacccgccgtgaaaattccgacctcgtgcggggtgtgatatcggcaagacacatatccagttttaaatcttcttcaaagacggcctgcttgtcaccgattccggctgaaagtgctttatctgcctgttcgtatgattccgtgaggcgctctcccggaacgatccgtccgatgccggcggtgacaggcagcccaaaaacggcgccgatctttttaatgagctgtgttttggaagccgaatttgcttcatgattaatgagaattcgttcatttccccagcggacaaacaggtcttcagggcattcgtactgccagagccgcccgagctcctccgctttatattgctcataacggccttgaatgagtatgatccggcggtatgcgtgaaggtctgcgccgatgagctttgctttttctaaaaagcccggagaccattctttcagctgcagccaatcaaccataaaggattcaagcattctcgcacgccactgcgcttcttccatatggcgcgtttctttaataaacagctccgtcatttttctgagcaattctccgaaaggcaggatatcgtcagggtctcctgtcaggccgaatactccgatcacttcatggcctgaaaaaacggggagattcagtcctgcttttacgccctcgagccgtttttcatcttctttcgtaatgatgacattccgtttttcgcgcgcgcagatcagtgcgccttcatgaaaccatccggcgcgcgcctcgttggtgcccgcgatgatcatcccttttgtatcggcaataatcacttcgcggctgtacatatgtttgacttcggcaatcaatttctttgccagttccggctgtaactgcatggcgatccccctcgccattattatacaaaaaaaccgggtgtcccatcacccggttcatgcttattgcgcaggttttaatccgccttcaagtgttttgagcatttcatttttttctgagtccgacgcatgctgccaaagaacttcgaataagacgccgaggcccggaagcattttttcttcaccgctttggatggcgtcaacgatcgtatgctccagctgatcctggttattgccggttacattggcaataacggcgttgcgtaaattaagatccattacaaccgctcctttttctgaatgtgatacgcatattcttaccgcgcacgcggtttattatgtgctgttcttaagatataataacaacatgcatgaaaaaaggagagcacagacataaagtgaaacgaatcgactctgcaaaaaaccaaaaagtgaaggactggaaaaaacttcacacaaaaaaagagagacttaaaacgaatacatttctgatagaaggagagcatctggcagaagaagcgctcaaatcaaagggaacggtaaaagaaattctcgtaaacgatgagagcgccatcccggccgatctggacatgagcattccgtgctacgtgctgagcgaagacgcgttttcagccgtgacggaaacagaaacgccgcagcggatcgccgcggtctgccatatgccggataggcagcctgatcagctgaagcggctgcttctgattgatgccgtgcaggatccggggaatttaggaacaatgatcagaacggcagatgcggcgggaatcgacgccgttgtccttggtgagggaacagcagacccgtacaatggaaaaacgctgcgttcagcacaaggatctcattttcatattcccattttgaaacgtccgcttgatgagttcaccgctgagctgaaatcacaaggcgtcacgatctacggcacggcgcttgaaaacggtgcggcttatcaaagcgtgaagcctgaagaatcgttcgcgttaatcgtcgggaacgagggggcgggagtggacgccggccttctgcaaaaaaccgatctcaacctgtacgttccgctgtacggacaggcggaatcgctgaatgtggcggtagcggccgccatcctcatttatcatctcagaggataggttgcgaaaagccttggatttcactataatagatagcaataatgtaaaaaccgtgacagaggacgtcaatttttgcacacactgccttccagggagaaaatgccgctgactgagagcatttttatcgcagcacaaaaattgattttcacctctcgagttgtcaccgggaccgcgccaaacgcgcgtaaaggtgaaccggaacgatcgtttccgttatgtcaatgaagctgtcggcagatgaagtctgccttaaaaagggtggtaccgcggccacaactcgtcccttctctcaaggggcgggtttttttgttttctgaaaaaggcatagaacggtttggtttacataaaaggaggatgcatgatggaagagaagcttaaacagctcgaactggaagctgcagaaaaagtagaagcggcgggttcattaaaagaagttaacgacattcgggtgcaatatctcggaaaaaaagggccgattacagaagttctccgcggcatgggcaaactgtccgccgaagagcgcccgaaaatgggagcgctcgccaatgaagtgagagagcgcattgcagcagccattacggcgaaaaatgaacagcttgaacaagaagaaatgaataaaaaactcagcagccagacgattgacgtcacgttgccgggcagtcaggtaaacatcggcggacgccatccgctgacggtcgttattgaagaaattgaagatttatttatcggcatgggatataccgtcgaagaaggccctgaagtggaaacggattattacaactttgaggcgctgaacctgccgaaggaacatccggcccgtgacatgcaggacagcttttacattacagaagaaatgctgatgagaacgcagacgtcaccggtgcagacgcgcacgatggaaaagcataaaggaaaaggccccgtcaaaatcatttgtcccggtaaagtgtatcgccgcgacaacgatgacgcgacacattcccatcagttcatgcagatcgagggtctcgtcgtcgaccgcaaaatcagcatgagcgacctgaaaggcacgcttgaattggtcgccaaaaaaatgttcggccaagatcgtgaaatcaggctccgtccgagctttttcccattcacagagccttctgtcgaggtggatgtgacctgctttaagtgcggcggacaaggctgctccgtctgcaaaaaaacaggctggatcgaaattctcggcgccggcatggttcacccgaacgtgctgaagatggctggattcaatcctgaggaataccagggtttcgctttcggaatgggtgttgaacgtatcgcgatgctgaagtacggcattgaagatatccgccatttctataccaatgatgtcagattcatttcgcagtttaaacaggcgtaagaggaggatacacatgtttgtttcttataaatggttagaagattacgttgacttgcagggaatcgatccggccgtgcttgcagaaaaaattacgagagccggtattgaagttgagggtatcgagtataaaggggagggcgtaaaaggcgttgtcataggacacgtgcttgagcgcgaacagcacccgaatgccgacaaactcaacaaatgccttgttgatatcggtgcggaggaacccgtgcagattatctgcggcgccccgaatgttgagaaaggacagaaggttgccgttgcaacggtcggagccgtgcttcccggcaatttcaaaattaaaaaagccaagctgcgcggcgaagcgtctcacggcatgatctgttcccttcaggagctcggcattgaaagcaagctcgtggcgaaagaatatgcggaaggcattttcgtttttccgaatgatgctgaaacgggagctgacgcaatggcggcccttcagcttgatgatgcgattttagaattgggtttaacgccgaaccgcgccgacgcgatgaacatgctaggcgtggcttatgaagttgcggctatcctcggcgcagaggtaaagcttccggaggcttcatatgaaaaagcggcagaaaaagcggcggatgctgtttccgttaaggttgaagatacgcaggccaatccgcattatgccgcaaaaatcattaaaaacgtcaaaatcggcccgtcaccgctttggatgcagacgaagctgatgaatgcaggcatccgcccgcataacaacgtcgtggacattacaaacttcgtcctccttgagtacggacagccgcttcacgctttcgattacgaccggttcggttcaaaagaggtcgtcgtcagaaaagcggcggaaaacgaaaccatcgtaacgctggatgaacaagagcgaaagctgtcaagcagccatttggtcatcacaaacggaaaaaaagcgcaagccgttgcgggagtcatgggcggagctgagtctgaagtccgtgaagacaccactgcgattttactggaggccgcttatttcgacggacagaccgtccgcaaagcgtcgagagacctcggattgagaagcgaagcgagcgccagatatgaaaaaggcattgatccggcccgcgttttgctggcggctgaacgggcctgcagtctcattcaggcatatgccggcggagaagtgctctcaggcacggttgaagaaaaccatctgaaaattgaagcaaacaatattcacgtgtctgttgaaaaagtgaacgccgtgctcggcatgacaatcgctaaagaagaaatcatcagcatttacaagcgcctcgggtttgcagtcggtgaagctgaagacgttctcgtcgtaacggtgccgtcgcgccgcggagatattagaatagaagaagacctgattgaagaagcggcgagattgtacgggtatgacaatattccgtccacgcttccggaaacggccggcacgacaggcggcttgacaccgtatcaggcaaaacgccggaaagtgagacgtttccttgaaggagcgggtctttcacaagcgaccacttattcattaacgaatgataaaaaagcggccgcttttgcgatcgaaaaatcattcaacacgatgcttgctctgccgatgagcgaagaaagaagcattctcagacacagcctcgtgccgaatcttcttgaagccgtttcatacaatctggccagacagactgattccgttgctttatatgaaacgggttctgtatttctgacgaaagaagaaaacacaaaaccggttgaaaaagaaagggttgccggagctgtaaccggattgtggcgcaaaaatttatggcagggtgagaaaaagcaggttgatttcttcgtcgccaaaggaatcgttgaaggcctgctgcatcaattgaatgtgtcagaccgtgttgaatttgtccagtcagaacgcaaaaacatgcatcccggccggacggcaaacattctattgaacggttcgcttgccggatttatcggccaggtgcatccggcaatggaaaaagagctggatatcaaagaaacgtatgtgttcgagcttgatctgcacgcgcttctgaccgaggaaacagaacctgtcgtgtatacgccgattccgaagtacccgtccgtcacgcgcgacattgcgcttgtggcagataaaaccgttacaagcggacagcttgaagccgtgatcaaagaagccggcggcgcgctgctgaaagaagtcaccgtgtttgatgtgtacgaaggtgagcatatggaagaaggcaaaaaatccgtcgccttctcgctccaatatgttaaccctgaacaaacactgacagaagaagaagtgacaaaagttcatgaaaacgtgctgaaagcgctggaagaaacgtatcaggccgtattaagaggataaagaaaaagcttgcagatcactctgcaagcttttttattatgaccgcttccgttcaacaaggcgtttcgctttttgcgtattggcaaaatgaagtttggtgaacgttctgagcgcaccttctcccttattgatgatcagcttggcggcagcttcatcgacatgcggccccgcgcctttcggaatcgtcatcccagcctcacgggaaagcttatccatttcaattaagaaagaatatcgcgcaatgatagaggctgcggcgacggaaagatgtatgctttccgctttcgtgctgaaaaacgttttttcttttacgatatcccgtccggaaagatgcttaaaataaatgccgggctctgcgaattggtcaatcagaatcgcttccggtttaacgccgttcatttttctcagcagattggaaatcgcctgattatgaaggagcgccttcatttttccttggctcatgcctttttcctgcatctgattgtatttttcgttttttaacacaagcaggctgtaaggaatggttttaattaacagtttggcgatttcaataatctgcggatcttttaaatccttcgaatccttcacaccgagttctttcattaaagaaagctttgatttgtcggcgtaggcgcaggcaaccgttatcggcccgaagtaatcgcctgttccgacttcatcagagccgatcactgacatggaggcaatgcccgccgggggagcgtaaagcgggtcggccgcttttttgacggttttctttgctttcggcgcctcagccgttccccagcgggccgcttctgtgccggcgttttttccttgaaagagaaccttgcccgagcggtaggctgtaatggtacagcccggaggcttggcctggaagacggcgccctgcggaacggcgggagtaagggagccggcataggattgtttcatttgttccatagcggaagcggatacttttatcacagaatgggacacgatataatctccttttttggcacttttcactgtatataccagtgtatcataacagcccgaggctcgtctttccattcaaacgataatcgtggtatgataggaactaggattctcgcggaatggaggagaaacgttgtctgacggcaaaaaaaccaaaacgacagtaaacatttacggccagcacttcaccattatcggggaagaaagcaaagcgcatatgcgccatgtggccggagtggttgatgataaaatgagagaaatcaacgagaaaaatccatatcttgatataaataagctcgctgtattgactgcggtcaatgtcgtgcatgattatatgaaactgcaagaaaaatatgaaatactggagcggcagcttaaagaaaaggaatgaacaccatatgatagatatcatcatcttagttttgctcttaatgggcacattgcttggattaaaaagaggatttatcctccaatttatatatttaacgagtttcatcctctcgattgcgtttgcggcgcttttttacaaaaatctggccccgcatctgagctttatacccgcgcctgatttttccggcgggcaggcggctctgtcttttattaaaggaaacgtagagacggcttattacaacgcgatcgcgtttgtcattttgtttatcatcgcaaagattctgctccggattatcggagcggcgcttaatatcatcgccagcattccggtcattaaacagatcaacaaactgctgggcggggtgctcggatttctggaagtctatttatttgcgtttatcctgttatacgtcgcatccgtactgccggtaagcgcgcttcaggatatgctcgcacaatcgacgcttgcaaatatcatcacacatcatacgccgtatctgtcagggctcctgcaagaactgtgggcccagtacggggcataaaaaacttctcttgaccggagaagtttttttcaagctctgcgtcagttgtgccggaggagaaaaatttgtatgatgaaaagcaggaaacgactgggggttaacagtatgcataaaaaagatatcatcaggctgcttgaaacgattgcggtctatatggaactgaaaggggacaacccgtttaaaatatcagccttccgaaaagcggcagcggcgcttgagcaggatgaccgcagcctgtcggaaatcgacgacatgatgtctttatccggaatcggaaaaggcacctacggcgtcattcgtgaatatatgcaggaaggtgtgtccggcacgcttctccaattgcagaaagaagttccggaaggcttggttcctcttttgaagcttccgggcctcggcggcaaaaaaatcgccaagctgtatcaggaactgggcgttcatgacgcggaatcgctgaaagaagcatgcgagcagcaaaaagtacaggggctcgccggtttcggaaaaaaaacggaggagaaaatcctccaggctctcggagaagccggaaaacagccggaacggtttccgatcggctatgcgctcagcattgcttcagtaattgaagaacatttggcccggctgacggatattcagaaatattcccgggccggcagtctcagaagagcgcgggaaaccgtaaaagatctcgattacattatcgctacagatcatccggaggctgtcagagaacagcttctttccctcccgaacgtaaaagacgtgatagcgagcggggatacaaaagtatcagtcatcctgacctttgaatatgagacgagtgtggatttccggcttgtgacagaggaacagtttgccaccacactgcatcattttaccggttctaaagatcacaacattaaaatgcgccagctggcgaaagagcgcggtgaacggatcagtgaatacggggtagaaaccatggaaacgggagacgtcaaaacattcccgagcgaagaagcgttttacgcccacttcggtctgccgtttattcctcctgagctcagagaaagcgggcaggaggtcgacacgtaccgggaagaaacggatcttgtggagcataaagcgataaaaggcgatctccacatgcactcagcctggagtgacggcgctttttccatcagagaaatggcagaagcgtgtatggcaaaaggctatcagtacatggcgatcaccgaccattcccaatatttaaaggtagccaacgggttaacggccgaacggctcaaaaaacaggcggaagaaattgacgcgttaaatgctgaatttgaaaattttcatatttttaaaggcgtagaaatggacattctccccgacggttcacttgattatgatgacagtgttctgtcggaaatggatcttgtcatcgcatctattcattcaagcttcagccagccggagcatgtcattatgaaacggcttgaacaggcgctgacgaataagcacgtggacattatcgcccacccgacgggacgcctgatcggcagacgggccggctatgaagtcgacatcgacatgctgattgaactcgccgccaaaacaaatacggcgcttgaactgaatgcaaaccccgcgcgccttgatttacggactgagcatctgatcaaagcaaatgaaaaaggcgtgactttggtcattaataccgatgcccataatatcgagatgctcgatgatatgaaaacgggcgtgaccgctgcgcgcaaagggtggacggagacaaaacatgtgttaaacgcccggccgctacacgaggtcaaagcatttctgacgcgcaatgattaagtaaggaggatcacaaaaccgtgcagcaaaaagtgttatcatcacttgaatttcataaagtaaaagaacagattaccgcacatgccgcctcatcgctcggccgggagaagcttctgcagctgaaacctttgacggatctctcagacatccaaaaacagctggatgaagtcgaagaagcatccgcggtcatgcgcttgagaggccatgctccgttcggcggcctgaccgacataagatccgctttacggcgggcggaaatcggcagtgtgctgacgccggcggaattcaccgaattgtccgggctgctgtatgcagttaaacaaatgaagcattttatcagccaaatgacagaagacggcgtcggcattccgctgatacaagcccatgcagaagaactgattacattaggcgatttggaaagggagattaactcctgcattgatgaccacggtgaagtgcttgatcatgcgtctcccgctttaaggggaatccgcacgcagctcaggacgcttgaatcaagagtcagagaccggcttgaatcgatgctgcgttcatcttccgcttctaaaatgctgtctgacaccatcgttacgattcggaatgaccgctttgtcatcccggtcaaacaggaatacagatcaagctacggcggaattgtccacgatacatcttcatccggtgcgacactgtttattgaaccgcaggcgatcgtagatatgaacaactcgcttcagcaggcgaaagtaaaagaaaaacaggaaatcgaacggattctccggatgctgacggagcatacggctgaacacacacaagaaatcgctcaaaatgtggaagtgctgcagacactggatttcattttcgccaaagcgagatacgcaaaagcgatgaaggcgacaaaaccattcatgaacggagacggctttatccggctgaaaaaagcgcgccatccgctgctgccccaagatcaagtcgtggccaacgatattgaactgggcggagattattcaacgatcgttatcacgggaccgaatacgggcggtaaaaccgttacgttaaaaacactcgggctgctgacgataatggcgcaggcaggattgcacataccggctgatgagggatcggaagcagcagtatttgacaatgtgtttgccgatatcggcgatgaacagtcgatcgaacaaagtctgagtacgttctcatcccacatggtcaatatcgtcaatattttaaaagacgtgtctgaaaacagtcttgtgctgtttgatgaactcggtgccggaacagatccgcaggaaggagcggcgcttgccatgagcatccttgacgaagttcaccggacaaacgccagagtgcttgcgacaacccattatccggaactgaaagcatacggatataacagacaaggcgtcatgaatgccagcgttgaatttgacattgaaacgctttcgcctacctataagcttctgatcggagtgccgggccgaagcaacgcatttgaaatctcaagacgccttgggcttccggagcatatcatcggccaggcgaagtcagaaatgaccgccgaacataacgaagtcgatctgatgatcgcatcgcttgaaaaaagcaaaaaaagagcggatgaagagctttctgaaaccgaatcaatcagaaaagaagcagaaaaactgcacaaagaacttcagcagcaaatcattgagctaaacgcccaaaaagataaaatgatggaagaagccgagcagaaagctgcggaaaaactggaagccgccgcaaatgaagccgaacagatcatccgcgagctcaggtctatcaagcaagaacacagatcctttaaggaacacgagctgattgacgccaaaaaacgtctcggagacgcgatgccggcttttgaaaaatcaaagcagccggaaagaaagacagagaaaaaacgcgagctgaagccgggcgacgaagtaaaggtgctcacattcggacaaaaaggggcgctgcttgagaaaaccggcgagaaagaatggaacgtccaaatcggcatcctcaaaatgaaggtgaaggaaaaagatctggagtttctcaaatcggctcctgaaccgaaaaaagaaaaagcaatcaccgccgtaaaagggaaggattatcacgtatcccttgaacttgacctcaggggagagcgttacgaaaacgccctcagccgcgtcgaaaaatatttagatgacgcggtgcttgccggctatccgagagtgtccatcattcacggaaaaggcacgggcgccctccgaaaaggggtgcaggatcttctgaaaaaccaccgcagcgtgaaaagctcgcggttcggggaagcgggagaaggaggatcaggcgtaacgattgtcgaactaaaataaaaagggagtaaacgtcatgaatgctttttgggaaaatgagcttgttgaaatcgcggcttattacagtgtagcggtcttgtgtctcgtcatttttctgaccgtgtttgaattggtgacatcctataaaaactgggtggaaatccaaaaaggcaatcttgcggtggcaatggcgaccggagggaaaattctcggtatcgcaaatgtctttcagcacagcatcgcccagcataattcgcttttgcaaatgatcggctggggcgtatacggatttattatgcttttaatcagctattttatctttgaatttctgacgccccggtttaaaattgataaagaaattgaaaaagataacagagctgtcggctttatttcatttgtcatctcagtcggcctgtcattcgtggtggccgccgggatttaaggggacggggaaaaatggagaagcttgcgaaagtgctgctgtcggcagcgggaatttttctgttcatcggacttatttatctggtcatgacatcttaatactgaaaaaaggctgccgaactaaaatcggcggccttttttattgagaataccagtttatgcaggccgtatcagagcaaatgacggcttcccaactcatggcgcggatgacagacggcatgtcttgatcttccatgagaaagagtgtcgtaaaagaatcatatatgctcataaaagcggcgcgccgtttttcgtcggcaatgatcatgtcagcccgcagcagtccgcatacatccgaagccgccgtttgattgagtgaaaatatgcctttctcttcgaccggctcataataagtgcagcgctttatgccttttgaacggaacacatccaaaagtcccggaattaaaaatggtgaagtgacatcatcgctcggcaagtacagatcgggatgaagccgattaaacagcctggcggattcaggatgtgcatattcctcccgcagtgccgtgacagcagtcataagcgcaagcgccgtctctttttcagagcgcaatccgcaaacggtcatgacggtttgccaggaaacgggtctgcccatcgcgatgatctctcatcactcggatacatatgttcataaggccgtttgcgcttttgctcttcccacccatcaggcatccggacaaagggatggagcaaaaaggcggccgacgtaaacggcttcggcagctggcgcaggataggaactccctcttcaaaatgcagcgtttccagcaagctcaacacctcctgaaactcgaaatttcacatgaaacgctttccaattccaatcacccttctgctataataatagcgtataggaaaacagaagggagaggtattatgcagtctgaaaagccatggctttctcaatatcccgaagagattccgcatgagcttgaatttaccgatcaaaccctgccatccaatctgacaaactccgcagctcaattcccgaaccatatcgccatttattttctcggaaaaaaactcacattccaggacgttctcacagattcgttaaagctagccgcttttttacgcaaaacaggcctgaaaaaaggtgacagagccgccattatgctgcccaattgtccgcagtcggtcatcgctttttacggtgtattgtttgccggcggcattgtcgttcagaccaatcctctctacacggaacacgagcttgagtatcagctgaaagacagtgcgccgcgcgtgatcatcacccttgatatgctgtttccgaaggtgataaaaatgaaaacgttatcactcgtcgagcacattattacaacgagtataaaagattttttgccgtttccgaaaaatatgctgtatacgctcacgcaaaaacaacaggtgcatattgattatgacggctacgaacaaattcacaaattagcggatattttaaaaaacgaaagagcggaggaggcagagccatttgatattgaccctgcgcatgacatcgccgtgcttcaatacacgggcggaacaaccggctatccgaaaggcgtcatgctcacacaccggaacattcaggctaatacagaaatgtgcgccgcctggatgtacaaaatgaaaaagggagccgaaaaggtgctcggcaccgtgcctttttttcatgtgtacggattgaccgccgtgctcaatttttccattatgcagggatgtgaaatgatccttcttcctaaatttaatcctttggataccctgaaaacaatcgacaggctgaagccgacggtttttcccggggcaccgacgatttacatcgggctgttgcatcacccggagctgaacaagtatgatttgtcctccattgaaagctgtccgagcggttcagcggcgctgccggttgaggtcaaacagaaatttgaaaaagtgaccggaggaaagcttgtggaaggctacggattatccgaagcatcaccggttacccattcaaacttcatttggggaaaaaataaacccggcagcatcggctgtccctggcccaataccgatgccggaatctattcagaagaaaaaggcgggcttgcggggccgtatgagcacggcgagctgatcgtaaaaggccctcagatcatgaaaggatactggaataagcaggaggagacggcgcgtgtcatcagagacggctggctgtttaccggagatatgggatatatggatgaggaaggatttttctacatcgccgacaggaaaaaagacatcatcattgccggcggatacaacatttacccccgggaggtggaggaggcgctttatgagcatgaagccgttcaggaaatcgtcgtagcgggcgtccctgattcctacagaggggaaacggtgaaagcatttatcgttttgaaaaaaggcgccgaggccgatgccgatgagcttgatgcgtttgcaagagagcggcttgcgccgtacaaagtcccgaagctttacgaattcagaaaagagcttccgaaaacggccgtcggaaaaatattaagaaggcgtttagtcgaagaggaagatgcttcccgtgaaaacaaggtgccttaaaagaaaaacttgacaaaatccggattcctttttatcatgaagttatgaatgaatagtcattcatttatcgaaggaaggaacgatgacattgaaccaaaaacggccaaagtatatgcagattattgatgcagcagtagaagtcatagcggaaaacggctatcaccaatcacaggtgtccaaaatcgccaagcaggccggcgttgcggacggcaccatctatttatatttcaaaaacaaagaggatatactcatttctctttttaaagaaaagatgggccagttcattgaacgcatggaagaagaagtgaaagaaaaaacgacggcaaaagaaaaactcgccctcgttattaagcagcatttcacactgctcggcaatgaccgccacctcgcgattgtgacccagcttgagctcagacagtcaaatatcaagctgcgcctgaaaatcaatgatattttaaaaggttatttaaacatgctggacaccattttgaccgaaggaatcaagtcgggggaatggaaagacaatctcgacgtccgcctcgcccggcagatgatattcgggacgatagatgaaacagtgacaacatgggtgatgaacgatcagaaatatgatcttccggatttgtcagacaaggtattggagctgttggtgtcaggaattcatcaaaactaaagggggttgacggatgaacagcctttcgatggcggtagaacaatctgttgcggtgatcaccattaatcatcagccggccaacgcgctgtccggtgcggttttagatgagttgtccggtctgttcgaccggtgtgaaacagatgacagcgtcagaagcatcatcattcgcggtgaggggaaatttttctcggcgggcgccgatataaaggaatttacgtcgcttgaaaatcttgagcaatcttctgccatggcggataaaggccagcagctgatggaaagaattgaagggtttccgaagcccgttatcgcagcgattcacggcgctgcgctcggcggcggtcttgagctagccatggcctgccatatcagaatcgccacattggatgcaaagctcggcctgcccgagctgaatctcggcattattccgggctttgccgggacgcagcggcttccccggtacgtcggtacggcgaaagcgcttgaaatgatcggcacttcagaacctgtgaccggagaagaagcgctcagcctcggccttgtcacgataggcgccgaacatgaggaagagctgctgaaaaaggcgaaaacgctcgcgggcaagtttgcggaaaaaagcccgcagtcgatggcttatctgcttgagctcctttattcaaacaagatctattcttatgacggcggcttaaagcttgaagcaaagcgctttggggaagcatttgcatcagatgacgcaaaagaaggcattcaggcatttctcgaaaaaagaaagcctcaattcggtgggcgaagataaaggggataaaaatatgaatctatttgtactgatgaaacggacgtttgacacagaagagaaaatcgtcattgaagcaggaaagattcaggaggacggggccgaatttatcattaatccgtatgatgaatacgccattgaagaagccattcagctgaaggaagagcacggcggaagcgttaccgccgtaaccgtcggcggagaagatgcggagaaagaactgagaaccgcccttgcgatgggctgtgaccaggcggtgttaatcaatattgaagatgatctgagcgatcctgaccaatactccatttcaactatcttatatcattatttcaaggaccgggaatatgatctgattctcggcggaaatgtcgcgattgacggcggttcaggccaagtggctccaaggcttgccgaactgctgaacattccttgcgtcacaacgatcacaaaactgacaatcagcggcgatgaagctgtggcagagaaagacaatgaaggggataccgaaatcattaaaacctcacttcctttagtcatcacggcacagcaaggcttaaacgagccgcgctatccgtcgcttccgggcattatgaaggcgaagaaaaaaccgctggaagaacttgagctcgatgatctcgacattgatgaagatgatgccgcaccgaagctcaaaacgatcgaacgttttctgccgccgcaaaaagaagcgggcagactgatcgaaggagaagccgctgagcaggcgaaagagcttgtgtcactgctgagaaaagaagccaaagtcgtataaaccgatattaaagaaactgggggatgtcagaatgggaaaaaaagtgatcgtactcggagaaattcgtgacggcgccttacggaacgtcacctttgaagccatagccgcaggcaaaaccatttccggcggaggagatgtcatcggcgtgctgatgggaaaaggcgcagctgatgcagcaccagaactcattcagtacggcgccgacaaagtatttacggccgattcgccggggctttctcagtatacggcggacggatatgccgcggttctcagggatctgatcgaaaatgaaaagcctgatgcggttattttcggccacacttctatgggaaaagatttgtcacctaagcttgcggcccggtttgaaacggggctgatttcagacagcacggatgtaagcgttactggagacaacatcgtttttacaagaccgatctattccggcaaagcctttgaacaggtgatttcaaccgatccgttcattttggcgacgattcgtccgaataatattcaggcattagaaaaagacgcgagccggacgggtgatatcgaagagcttgcggcgcctccggcagatttgcggacggtcattgaagaagtagtcaaaaaaacggcggacggcgtggatttatcagaagcgaaaattatcgtagcaggcggccgcggtgtaaaaagcaaagatggatttgaaccgttaaaagaacttgccgaggtgctcggagcagcggtgggcgcttcacgcggcgcgtgtgacgcggactattgcgattattcccttcaaatcggccagacgggaaaagtcgtcacgccggatttgtatatcgcctgcggcatttccggagcgattcagcacttggcgggcatgtcaaacagtaaggtcattgttgccattaacaaagacccggaagcggaaatatttaaaatagcggactacggaattgtcggcgatttgttcgaagtggttccgcttctgacccaagaatttaaaaatgccaatattcattcataatcataaaccctctggcttatttgtcagagggttttaatttgtgttaattggttcgtacaaattaaaggttgataaaataagagattgacatgtacgaaccaatataataagcttttgtaaagcgcttacaaacttatccattcagcatacatcccagatacatagatcggctgtagtgctttcattcttattaagggaaaggaatgatcaagtttgtctcacaatacggcagtcattcaaactgatatcacacggggaaccattaataaaaacatatacggacatttcgcggaacacctgggaagaggcatatatgagggcatctgggtcggaaaagattccgatattccgaataccggcggggtcaggacggatgtcgccgccgccctcaaacagcttcagattcccgtcctcagatggccgggcggctgttttgcagatgaataccattgggcaaacggcgtagggaaacgcaaaaccatgctgaatacccattggggcgggacgattgattccaatgaattcggcacgcacgagtttatgatgctttgtgaactgctcggctgcgaaccgtacatcgccggaaacgtcggcagcggaacggttaaagaaatggctgattggattgaatacatgacgtttgaagcgggcacgccgatgtccgactggagaaaagaaaacgggcgggaaaaaccgtggaagctgacatatttcggaatagggaatgagaactggggctgcggcggaaacatgcatcctgagtattatgccgacctttacagaaactttcaaacctatgtccgcaattacagcggcaatgaaatctataaaattgccggcggcgcgaatgtcgacgattaccgctggactgaaactttaatgaaaaaagccgctgatctcatggacgggctgagcctgcattattacacaataccgggcgacttctggaaggggaaaggatcagcgacggagtttacggaagatgaatggttcatcacgatgaaaaaagcggcgcatatggatgaattgatcacaaggcacagcgccatcatggatcagtacgatcccgaaaaaagagtcggactgatcattgatgaatggggcacgtggcttgatcctgagccaggcacgaatccgggctttctgtatcagcagaatacgatccgcgacgcccttgtcgcagccacgcattttcacatttttcatcagcacgcagaccgcgtacagatggccaatatcgcgcaaaccgtcaacgtgcttcaggcaatgatcctgacagaagggaaagacatgctgctgacgccgacgtatcatgtgtttgatatgtttaaggtgcatcaggacgcttctcttttggcgacagaaacaaaagcagccaggtacgaaaggaatgacggccggctcccgcaagtcagcatttcagcgtccaaacagcaaaacggagacatacatatcagcattagcaatatcgatcatctgcacaaagctgatgtgaagattgaactgcggggcatgaaaaagacagggaagccttcaggaacgattctgcacgcggaaaaaatgaatgcccataatacattcagcagtccggaaaacgtcaaaccgaagccgttttccgggtttgctcaaaagggcggaaaacttgaggcggagcttcctccgatggcgattgtattaatcacgctgcctgcgggcccatcttaagttttgaacgcctgccgcccggttataatacactgtataaaaaagattatttccggcgggttcgggagaaaataatataagcattaaattagcatgaacgaatgggagatgctatactaaaaatcatcatttgacaattggaggaataacaaaatggctatcgtaaaagcaactgatcaatcgttctcagctgaaacaagtgaaggtgtcgtattggctgatttctgggctccttggtgcggaccttgtaaaatgatcgcgcccgttcttgaagagcttgatcaagaaatgggagacaaactgaaaatcgttaaaatcgacgtggatgaaaaccaagaaactgccggtaaatacggcgtcatgagcatcccgacacttctcgtattgaaagacggagaagtcgttgaaacatctgtcggtttcaaaccgaaagaagctcttgaagagcttgtaaacaaacatctgtaagccgaaagcttccgttacggcagggcgattcctttgaagggaatcgcctttttttgaccttccaaaagctgagaatggagaaaaacaagtgttcgtgatacactgaatggacacgagaaatgaatgtaaggaagggtaacgtatgaataaacaactgaaagaaaaactggccctccttcccgatcagccgggctgttatttaatgaaagaccgtcaaaaaacagtcatctacgtggggaaagcgaaagtcttgaaaaacagggtgcgatcttatttcaccggttctcacgacgcaaaaacccaacggcttgtgacggagattgaggactttgaatatatcgtgacttcctccaatcttgaagcgcttattttggaaatgaatctgattaaaaaatacgatccgaaatacaatgtcatgctgaaagatgataaaacctatccctttattaaaatcacccatgaacgccatccgcggctgattgtcacccggaatgtcaaaaaagacaaaggacgctatttcggcccgtatccgaatgtgcaggcggcgcgggaaacgaaaaaactgctggatcgcctttacccgctcaggaaatgctcaaagctaccggaccgcgtctgtctatattatcatctcggacaatgcctcgccccatgtgtaaaggatatatctgaggagacaaaccgcgagattgttgaagacattacccgttttttaaagggagggcataacgaaatcaaaaaagagctcgaagcgaaaatggcagaagcggcggaaaagcttgaatttgaacgggctaaagaattccgcgaccagcttgctcacatcgaatcgacgatggagaagcaaaaaatgaccatgaatgaccttctggaccgcgatgtgtttgcatatgcctacgataaaggctggatgtgcgtccaagtctttttcatacgccaaggaaaactgatcgaacgcgacgtcagcatgtttccgatgtatcaggaagcggatgaagaatttctgaccttcatcggccagttctactctaaaaacaatcactttctgcctaaggaaattctggtgcctgacagcgttgacagggacatgatcaccgagctgttggaaaccgccgtgcatcagccgaaaaaaggcccgaaaaaagagctgcttttgcttgcgcacaaaaatgcgaaaatcgctctgcgggaaaaattctcgttaatcgagcgggatgaggaacggtcaatcggtgcagccgaacggcttggcgaagcgctgaatatttacacgccgcatcggattgaagcgtttgacaactccaatattcaaggcacaaaccccgtatcggccatgattgtctttattgacggaaaaccgaataaaaaggaataccgcaaatataaaattaaaaccgtaacagggcctgatgattacggctcaatgagggaagtcgtcagaagaagatacacgagggtgcttcgcgaaaatcttccgctgccggatttaatcatcattgacggcggaaaagggcagattaacgcggcgcgcgacgtgctcgagaatgagctcggccttgatgtcccggtagcgggattggcgaaagatgataaacaccgaacatccaaccttttgatcggcgacccgcttgaaccggtgtttctggagcggaacagccaagagttttacctgcttcagcgtattcaggacgaagttcaccgttttgcgatcagctttcacagacagatccggggaaaaagcgtctttcaatccgttctggatgatatccccggaatcggtgaaaaacgaaaaaaaatgctcttaaaacatttcggatctgtcaaaaagatgaaggaagcaagccttgacgatatcaaaaaagcgggtgtgccggccgcggcggcccagctgctgtttgaaaaattaaaaaaatagtattgtgcttttctgaaaaatctgctagaatgtgaactaatttcataagatcgtgttatatggtgaagatagaggtgcgaacttcattagtaagcctttggagaatgatggattctgcgaaaaaggctgaaaggggagcgtcgccgaagtgtatcacatcccatcggtgtgatttgctggccttgcattaaataaatgtaaggctgtcaagaattcattttcttggagggctatctcgttgttcataatcaatcgtaatgatatgaaaaagcaatgagagctattcctctcattgctttttttattgtggacaaaacgctcttttctcctcacccgcacgaaccaaaatgtaaagggtggtctagtatgggtcttatcgtacaaaaattcggaggcacttccgtcggctctgccgaaaaaattcaaaatgccgcaaatcgcgccattgctgaaaagcaaaaaggccatgacgtcgtagtcgtcgtttcggcaatgggaaaatcaaccgacgcgctcgttaacctcgcggctgaaatcacatctgaaccaagcagacgcgagatggatatgcttttgtctacgggagagcaggtcacgatttcgcttttggccatggcgcttcaggaaaaaggatatgacgccgtctcttatacgggctggcaggcgggtgtccgcacggaagccgttcacggcaatgcgagaattacggatattgatatcacggcgattcgttcgcagcttgcagaaggcaggattacagtcgttgccggttttcagggcgtaacggaagacggaggcatcacgacgctcggacggggcggttccgatacgacggcggtcgctcttgccgcagcgctggaagcggataaatgcgacatttatacagatgttccgggcgtatttacgacagatccgcggtatgtccggtcagcgagaaagctggcgggaatttcttatgatgaaatgctggagcttgcaaatctgggagcgggtgttcttcacccgcgggcggttgagttcgcgaaaaactaccaagtgcctttagaagtgcggtcaagtacggaacatgaagcgggaacattaattgaggaggaatcatcaatggaacagaatttaatcgtcagaggaattgcatttgaagaccagatcacgagggtgtccgttacgggcctgacaagcggactgactactctttcaacaatcttcaccgcgctggcaaaacgaaacatcaacgttgacattattattcagacacagtcggacgatggggaagcggatatttctttctcagtgaaaacggaagatgccgcgcaaacggtcgccgtgcttgaagaatataaaaacgcgcttgactatgaaaaaattgaaaccgaaagaaaactggcgaaagtctccattgtcgggtcgggcatggtttcaaatcccggcgtcgccgcggacatgtttgccgtactggcggaaaaaaatgtacaagtcaaaatggtgagcacatctgaaataaaagtatcagcggttgtcagcgaaaatgatatggtgaaagcggtcgaagcgcttcatgatgcgtttgagctttctaaacagccgtctgctgtgtaaacgggcaggcaaaaaggcgggacttggagtcaccgccttttttcaattatacagggtccttcatatcccattttacagtcaggacgactttatccgctctcttttttacctgttcataagattctgcgatctgatcgttcatcaattgaatctgttcggctataaaaccggcttcaagctgaaaacaaggctctttctgatgtttgagtctgctggatacgagcggtccttccagttcaaattccagttcttgtttttttgatcctgcgtttgtcaaagttccccagccggctttttcaaaaaaggcggggatttcttcccacgattgaagaggaaatttgcgggcgaggcgttttcccgcccaatacatcatcgatgaatactccgggccgaggatatccggaagcacgatttcccggattaattcgtagccgtatgcgctgacgtcgagttcagttaaaggttctaaagctgcttcataattattcttcatattatgtattcccctctctccttcgtttattatagcttaaacaggggggaggattacaggatgatcctataaaacacgcgaaaaaatgtgagaaagatatcgcaggaaaataaaattttccctccagataatcaattccgaaaattataatttatgtacacgttttcttgacgcccttttgagggaggagtaaaatgaaattgtcaataaattttaataaagtgcttacaattgaaacgaagtgggggcagagattttagtacatttcgcacttaaatcaaacagggggtaaagtaatgtctgggaacagagagttttattttcgaagattgcattccttgctcggtgttattccggtcggcatctttttgatccagcatttagtcgtcaaccaatttgccgcaaggggagcggatgcgtttaacaaggcggccggctttatggacagtctgccgttcaggtatgcgttagaaatttttattattttcttacctttaatttatcatgcggtttacggtgtgtacatagcatttactgcgaaaaacaacgctggccactacagttatttcagaaactggatgtttgtgcttcagcgtgtcactggtattctcacccttattttcgtcagctggcatgtatggcagacgcggattgccgcgcagatgggcgctgaagtcaacttcgatatgatggcgaatattttgagctcgccgtttatgctcggtttttacattgtaggcgttttatcggtcatttttcacttttcaaacggcttatggtcttttgcggtcacatgggggatcacggtcacgccgcgttctcaaagaatttcgacttacgtgacgctgattatatttttagcgctttcatacgtaggtttaaaagcgatttttgcgtttgtgtaagagaactagattactagagggagaggggctatcatgagtcaatcaagcattatcgtagtcggcgggggtcttgccggcctcatggcgacaattaaagcagcggaatcaggcacggccgttaaattgttttccatcgttccggtcaaacgctctcactcggtctgcgcgcagggcgggataaacggagctgtcaacacaaaaggggaaggagactctccgtttgagcattttgatgacacggtatacggaggcgactttttggcaaaccagcctcctgtaaaagcgatgtgtgaagcggcgccgtccattatccacttattggaccgcatgggggttatgtttaacagaacgccggaagggctcttggacttccgccgtttcgggggtacacagcatcacagaaccgcatacgcgggagcgacgacgggtcagcagcttctttacgcactggacgagcaggtgcgcagatatgaagtggcgggtctcgttacaaaatacgaaggctgggaattcctcggcgccgtgcttgacgatgagcgcacgtgccgcggtatcgtagcccaaaatctgaccaatatgcaaatcgagtcattccgttctgacgccgttattatggcgacaggaggtcctggaatcgtattcggcaaatcaacaaacagcatgatcaacacgggatctgccgcatcaatcgtttatcagcagggcgcttattatgcaaacggcgaatttatccaaattcacccgacagcaatcccgggggacgataaactgcgtctgatgagtgaatcggcgcgcggcgagggcggaagagtctggacgtataaagacggaaaaccttggtacttccttgaggaaaaatatccggcttacggaaacctcgtgccgcgggatattgcgacacgtgaaatctttgacgtgtgcgtgaatcagaaactcggcatcaacggtgaaaacatggtgtatctcgatctgtcgcacaaagatccgaaagagctcgacgttaagcttggcggcattatcgaaatctatgaaaaattcatgggcgatgacccgcgcaagcttccgatgaaaattttccctgccgttcactattcaatgggcggactgtgggttgattatgatcagatgacaagcatccgcggactgttcgcagcgggagaatgtgattattcaatgcacggaggaaaccgtttaggggcgaactctctgctttccgccatctacggaggaatggtggccggaccgaatgcggtgaaatatgtttccggacttgaaacatcagcggaagacctgccttcttcattatttgattcctatgtgaaaaaagaagaagaaaaatgggccgatattatgaagatggacggcgacgaaaatgcctacgtgcttcaccgtgagctcggagaatggatgacggccaacgtcacggtggtccgccacaacgacaagcttttgaaaacggatgacaaaatccaagagctgatggaacgctttaagaaaatcaatatcaacgatacgacaaaatggagcaaccaaggggcgatgttcacccgccagttctccaatatgcttcagcttgccagagtcatcacgctcggcgcatataaccgaaatgaaagccggggagcgcactataaaccggatttccctgaaagaaatgacgatgagtggctcaaaacgacgatggctaaacatgccggtccgtttgaagctccggaatttgaatatcaggatgtcgatgtatcactgattgcgccccgtaaacgcgactactcgaagaagaaggtggcgaaataatcatgagtgagaaaaagatacggtttatcattacacgtcaggatacgcccgaaagcgcgccatacgatgaagaattcgaaatcaattaccgcccgaacctgaacgtgatttccgccctgatggaaatccgcagaaatcccgtgaatgcaaaaggagagaaaaccactccggtcgcatgggacatgaactgtcttgaagaagtatgcggcgcctgctccatggtcatcaacgggagaccgcgccagtcatgtacggcgctgattgataagctggaacagccgatccgtctgaaaccgatgaaaacattcccggttgtccgtgaccttcaggttgaccgcagcagaatgtttgattcactgaaaaaagtgaaagcatgggtgccgattgacggaacttacgatttggggccggggccgagaatgccggaaaaacgccgccagtgggcatatgaattgtctaaatgcatgacatgcggcgtctgcctcgaagcctgcccgaacgtcaacagcaagtcgaaattcatggggcctgccccgatgtcgcaagttcgtctgtttaacgcccatccgacgggcgcgatgaacaaagcagaacgtttagaagcgttaatgacagacggcggcctcggagattgcgggaattcacaaaactgtgttcaatcctgcccgaaaggcattccgcttacgacttcaatcgccgctttgaacagagataccaatttacaagcattccgtaatttcttcggaagcgacagagtataagaaagagaaaaagagcctcttccgcacgggagaggtttttttataaggagctgaaggtgatgaaacaaccgcaatatattgatatcccgtttgaagaatggagacagtcgttttctttctttactgaagtatcggttcgtttttcagaaacggatatgttcggccatatgaataatgtaacccctttcatctattttgaagaagcgcggatcgcttatttcaaacagcgaggcataacggcgcaaaactcggaaacgatgacggtcgtcgcaagccagcagtgcgactatatgcgtcaggtgatgccgtatgaaaatctgcggatttatgtgaaagcaagcgctgccggaaatgcgtccgtcacccttcattaccttggagaaaatgagtcgggcctgccgtgctttacaggttccgtcgttatggttcaagtgtcgaagaaaagcggcaaagcggtcagctggacggagcgggagaaaggcattctgctcgcctgaacggataactatttctctaagagacgtcacctccgaagcgccctttacatatgatatcttgactatataaacccattcgtttcagattcgctctcaccttagcaaggagggttacaatacttgaaggagaaagattttcaatcaaagccgctgctgaccaaaagagaaagagaagtattcgaattgctcgttcaagacaagacaacaaaggaaattgcaagcgagctatttatcagtgaaaaaactgtacggaatcacatttcaaatgccatgcagaagttaggtgtgaaagggcgttcgcaagctgttgtcgagcttcttagaatgggtgagctagagctctgattcttgccggttttccttcttttcgagaaggagccggttatttgcgttggcgcccgggctgatgggcatgcggtgaaaatcccggtttttcctttttctccgtcagtcttgcattttcttaaaaaaagaaggaaaatagacacggagcgcatagcccagaaagatccttgagtgagggatggacaaatgacatcaaaatctgtagagcatgttgcggatatcgaaaaatcactccgccatatcgctgcgatcattaaacaaaaaggaagagaaatccttaaccaatatgcaattacaccgccgcaattcgtggggcttcaatggctttatgaattgggggatatgacaataggcgaattatcaggcaaaatgtatttggcttgcagcacgacgacggatctgatagaccgcatggaaaaaaataagcttgtcgagcgggtgaaagacccggctgacagacgggtcgtcagaattcatcttctcgctgaaggagagcgcattatccaagaagtgattttgaaaagacaggcttatttgcgggatatgtttgcgacattttccgaagaagaaacagccgctttcgaaaaatcattattgaaactgcagcatgaaatgaaaagaaaatgaggcgattttgttggaacagccgataggagtcattgattccggggttggcgggttaaccgttgctaaggaaatcatgagacagctaccgaaggaaaatatcatctatgtgggagatacaaaacgctgcccgtacggcccgcgtcctgaagaagaagttcttcaatacacgtgggaaatgaccgattacctgctggaaaaccaccatatcaaaatgctcgtaatcgcctgcaatacggccacggccattgccttggaggatattcagcgcaaaacggatattccggttgtcggcgtcattcagccgggtgcaagaacggcgataaaggtcacgaaaaaccagcatatcggcgtcatcggcacggtcaataccattaaaagcagagcgtatgagcaggcgctgctcggattaaacgcagaacttcaagttaagaacacggcttgtccgctgctcgtgccgtttgtggaaagcggacggtttcttcaggaatcagcggaggaagcggttgaagcatcgcttgagcctttaaaaggtacatcaattgacaccttgattttaggatgtacgcattatccgattttaaaagatccgattcagaactatatgggagagcatgtgaaaatcatttcctccggagacgagacggcgagagaagtgagcaccatcttgtcttataaaggtttgttaaaccaatcgaaacatgcaccggagcatcaatttcttacaacgggagagcggaacggtttcgcaaaaattgccgaagactggttcggccacgaaatcggccatgtcgagtgcatctcccttcaagagccggtcagaaaataaatcaaaaaaacctgctgtttacggcgggtttttttgcgcttcccggtctatttcccggacagggctcgtatacatcatagtacaaacagccttaggagggaaaagtatgctgaaaaaaggacctgcagtcattgctgcaacatgtcttacttcggcttttgtgttatctggatgcggtttgtttcaatccgataaaacagccggggaaattgacccgcctcaagacatttcatatgtaaaggatgaagcgggaattcaggcaaaaccaaagcagtcagagaaaaacggcacttctaaagccgaccagccggccaatacagtcatgcgagagctgtatctgattgataaaaacggctatgtcgcagcacagacactgcctcttccgaacagtgagggaaccgcaaagcaggcccttgagtatttggttcagggagggcctgtgtcagaaatcctgccgaacggcttcagagcggtgctccctgcggatacgacggtaaatgtcgatattaaaaaagacggcactgccgtcgctgatttttcgaaggaatttaaaaactataaaaaagaagacgaacaaaaaatcctgcaatcgattacatggacgcttacccaattcagctcaatagataaagtcaaaatcagaatcaacgggcacgaactgaaagaaatgcctgtgggcggcacgccgattacgggcgacttaagcagaaaagacgggattaatattgaaacggccggagtgaatgatctgacagacacccatccgctgactgtctattatctggcggaaacagagacaagcgaatactacgtacctgtcacaaagcggattgacaattcggaaacaaatgacatcactgctgccgttgaacagctcgccgacggaccgggcaaagcaagcgggcttttgacggactttaataacgatgttaagcttctcagcaagccgaaagtgaaagacggccaggttacactggactttaacagctccatttacggaagcgccgacgaaaaaacaaaaatggtatcatcgggcgtactggacagcatcgttctcacgttaaccgaacagccgtcaattaaaagtgtttctataaaagtaaacggaaaatcagaactggtgaatgaaaaaggagaatccctttcaaaacctgtttcgaggccgtcacaagtgaatacgggtagtttttaatttgcgatttttgatatactaataaaaaagaggttagcgttccggctgcctctttctttattcacaatccggaacaaaaggtttatgtacatataatcggaggtaaaatatgagacacgacggaagacagcacgatgagctgcgccctatcacatttgatttggattttatcactcacccggaaggctctgttttaattacagcgggaaatacgaaggtcatctgtaatgcatctgtggaagaccgggtgccgccatttttacgcggcggaggaaaaggctggatcacagcggaatacagcatgcttccccgcgcgacgaatcaaagaacgataagagaatcttcaaaaggaaaggtctccggcagaacgatggaaattcagcggctgatcgggcgcgcgctccgggccgtcgttgatttggagaagcttggcgaacgcacgatctggatcgactgtgacgtcattcaagctgacggcggaacaagaacggcttccattaccggcgccttcttggcaatggccattgcgatcggcaaactcgtaaaaagcggcgttatcaaaacctctcctgtgacagattatctcgcggccatttctgtcgggatggataaagaagaaggccttcttttggatctgaattatgaagaggattcggcggctgaagtcgacatgaatatcatcatgacgggaagcggacgttttgtagagcttcaagggacgggcgaagaagccactttctcccgtgaagatttaaacggactgttaagtcttgccgaaaaaggaatccagacgcttattcaaaagcaaaaagaagtgctggcagaaacattgcctgaactgaaataagaaagagaggcctgatcagcgtgaaagaagccattattgcgacacacaatcagggaaaagtgaaagaattcaaggaaatactcgaaccgaaaggctacagcgtctcttctttggcggaaatcggatttacggaagaaattgaagaaaccggacatacctttgaagaaaacgccatcttaaaagcggaagccgtggcaaaagccgtcaacaaaatggtcattgcagacgactccggtttatcggtggacaaccttggaggcagaccgggcgtttattcagcccgttatgccggagaagcaaaagatgataaagcgaatatggacaaggtgctgtcagaattaaaaggcatcgaaaaagagcagcgcacggcccgtttccgctgcgcccttgccgtcagcatgccggggcaggaaacaaaaacggtcgaaggtcatgttgaagggtatattgcggaaggacccgagggggataacgggttcggctatgatcccatttttattgtaaaagataaagataaaaccatggcccagctgacaagcgctgagaaaaacaaaatcagccacagggctgaggcgctcaagaaactgtcaaagctgcttgattcataagggggagcgtatgcaatgaaagtgctgataataagtgacagtcacggccttgaagacgagctggagacgattgcaaagcggcacgaagacgaagcggatctgatgattcattgcggtgattcagagcttgacgccgcacatccggcgcttacgccgtttcacacggtaaaaggcaattgcgactttggcggcgggtttcaggatgaacttcttctggacgcaggttcaaagaaaattctggccgttcacgggcatcttcacggcattaaacagtcacttttaactgttttttaccgggcggaagagcttggggcggatatcgtctgcttcggccattcacatattgccgggagtgaagagcttcggggcaagcttttgattaatccgggcagcatccgtcttccgagagtccgcaatgtgaaaagctatgccattcttactcttacagaaagagaaggcgccgtgacattttacgatgaaacgggtcgggaattgaaggactttgggaatacaatcagtttttaacaagtgatgggggagatttcattcttccccatcaaaagtttttaaaaaaatattgacttatgatttgaacctgtatataataaatcttgtcgctgatacataaagcaaaagctgtcccagtagctcagctggatagagcaacggccttctaagccgtcggtcgggagttcgaatctctcctgggacgtataaaaaaagagctggtgacatcagagtgaaaactgatgccgctggccttttttatcggatgactatattgtcaattcgctgatatcatggtaaaatgatcagcagaataatttgattttcatgtcccagtagctcagccggatagagcaacggccttctaagccgtcggtcgggagttcgaatctctcctgggacgtataaaaacctcaagccctgacaatgggtttgaggtttttttgtattttattttttgttttacgaaacaaaagttccgtatttgatgaaaattgtaaagtaattttaatataaatgaaacttaatgtaatatttatcgtaataaatatatgtataaagatacttaaggcgcccttgagtgataaattatctaatttctatcatacattttgtcaatgaatgatagaaagacagcaggaggaattagcttttgaagtacgcatttgcatataaaaatcacaatatagaaacgatcttttgcggaaaagacgagctgtttgaggaactgaagcaatttttaatcactcaatgcggtttaatcattgttgaggtttcaagggctgattactatacggagcaggaaatgaatcaatggaatgaccgttatactctgtgaataagaaaagaaaccggccgtgggaggccggtttttgtatcatctgaatccgctcggagcgctgaagcccccggcatggccgctgaaaccgcccccgagcgcgccgggatgcgccccggcgccgaggcttccgccgacgtcactgaaggattggccgtagtacccggttgtataagggtacggaacgaattgctgcccggcgaatgacagcgtgctttgcggggtctgctgtccgtatccggatgacgggaatccctgctgaaaagaagggccgccttgatatggtgctgtatgcatcggggccggaggatagtaagactgcggcggtaagaccggtaaaggcggaaatccaggaggcaggccctgcatgcctgataacatcttattcatgacatcactcatttcttacgagataagaacagtgtatgcgtatgtctgtagaaagagcctgttcaatcgaacggaatatctgacaagcatgccggaaggacagagaaaaattgtgtaataaaatgtgacatattcgtatatgaacggaaaaatttcatgtaatcttgagagattaataaaaaaatgataaaaacttttaacatttacagatccctttgtaccagtaatgaaagcgtatacaaaatagattgattaatctaaattgtctaataattataaaaatgctgttgacactgtctgcaaacgggcgtaatatgagttcaaacaaaaataaataaatgattcacgctaaaaagaaaaatcataaaacactgaaaaaacaaacaagtgaaggttcttttttaataaaagagctgccataataaaaagcgcagaagaggataagtagctttgctgaagtttttcacagagagccggtaacgctgagagccggtaaaacaaatcaaagtgaactcccctcagagtgccggtctgaaatgtaaagagtaggactcggccgagtgaacgcaatgtttactcgttatcaaaacggataatcattatccatgagacggtctgcatatgaccgtaaacaagggtggtaccgcggaaagcaaagccttttcgccccttttggctatcgcatgaaatgcttggctgaatgtgggtgggaaggcttttttatttgcgtcagccggcgctgcgttttatgaattggattttagaagggaacattgaaaaggaggaactgaaaatgggaacaaatgtacaggcggattctttgtctgccgaatgtacaaaaacaatgaacggggctctgatgctgattgaatcattaaagaaagaaaatgtcgagatgatcttcggctatccggggggagccgtccttccgatttacgataaactgtatcaatcaggattggttcacatcctgccccgccacgagcaaggcgcgattcatgcggcagaagggtatgcgagagtctccggaaagccgggggttgtgattgctacttccggacccggagcgacaaatttagtgaccggtcttgcggatgcgatgatagattcattgccgctcgtagtgtttaccggtcaggtggccacttcggtcatcggcagcgacgctttccaggaagccgacattttaggaattacgatgccgattacgaaacacagctaccaagtccgccgtccggaagatctcccccgtgtgattaaagaggcgttccatatcgccacgacgggaagaccgggcccggtattaattgatataccgaaggatgtcgcagcatttgaaggagagttcagatatgatcacgagatcagccttccgggttatcagcctgtaaaagagcctaactatctgcagatccgaaagctcgtggaagctgtcagcagtgcgaaaaagccggttattttagccggagcgggtgttttgcacggtaaagcttcagaagatttaaaaaattatgtcgaacagcagcaaattccggtagcgcacacgcttctcggtctgggcggtttcccggcagaccatcctctttttctgggaatggcggggatgcacggcacatacacagcgaatatggcgctttaccactgtgacttgttgatcagcatcggagcgcggttcgatgatcgcgtgaccggaaatctgaagcattttgcaaagtcggccaaagtggcgcatatcgatattgatcctgctgaaatcggaaaaattatcgaaacgcagattccggtggtcggcgacagtaaaatcgtccttcaggaattattgaagcaaaacggaaaacagggacagacagaggaatggaaacagcagctttcagaatggaaagaagaatatccgctttggtatacagacaacagagaagagggcttgaaaccccaaaagctgattgagtatattcaccaattcacaaacggtgaggcgattgtggcgacggatgtcggccagcaccagatgtgggcggctcagttttatcctttccgaaaggctgataagtgggtgacctcggggggactcggcacaatgggcttcggccttccggcggctatcggagcgcagctggccgatcgtaacgccacggtcgttgccatcctcggagacggcggttttcagatgactcttcaggaattagatgtcatccgacagctgaatcttcccgtcaaagtggttatcttgaacaacgaatgtctgggcatggtcagacagtggcaggaaatcttctatgaagagcgctattctgaatccaaattctcggcgcagcctgactttgtcaaattgtcagaagcctacggcattaaaggcgtccggatttcatcggaggaagaggcggaagaagagcttaaaaaggtgctttcatcaaaagaaccggccgttattgacgtccgggtcgccaaaagcgagaaagtattcccgatgattgcgccgggtaaaggacttcatgaaatggtgggggtgaaaccttgaaacgcattatcacattaacggtggtcaaccgctcgggagtattaaaccggatcaccggcctgtttacaaaaagacactataatatcgaaagcatcactgtaggccacacggaaacaagcggtgtttcaaggattacatttgtcgtccatgtggaaggcgaaaatgacgtagagcagctgacaaagcagcttaacaaacaaattgacgtcctgaaagtgacggatattacaaaccaatcgattgtacagcgtgagctggcattaatcaaagttgtttccgcaccgtcggccagaacggaaatcaatggaatcattgagccgttcagagcttccgtcgttgatgtctcaagagacagcatcgtcgttcaggttaccggcgaatctaataaaatcgaagcgctcatagagcttctcaaaccttacggcattaaagaaatcgcgagaacgggcacaacggcttttgcgaggggaacccagcagaagacgtcatccaataaaacaatttcaattgtataacacaaaaaagggagagattaaaatggtaaaagtatattataacggtgatatcaaagagaacgtattggcaggtaaaaaagtagcgattatcggttacggttcacaaggtcacgcacatgcgctgaacttaaaagaaagcggaattgatgtcattgtcggcgtcagacaaggaaaatcatttacacaggcccaagaagacggtcatcaagtcttttcggtaagagaagcggctgcccaggctgatatcattatggttcttcttccggatgaacagcagcaaaaagtatatgaagctgaaatcaaagatgaattgacggcgggcaagtcattggtattcgcacacggatttaacgtccatttccatcagatcgtgcctcctgctgatgtggatgtattccttgtcgcccctaaaggaccgggacaccttgtcagaagaacatatgaacaaggcgcgggcgtaccggcattgtttgccatctaccaggatgtatcaggcgaagcgaaagatacggctcttgcttatgcaaaaggaatcggcggagcgcgtgcgggcgttcttgaaacaacatttaaggaagaaacggaaacggatttgttcggtgagcaggctgttctgtgcggaggtttaacggcgcttgtcaaagcgggttttgaaacgctgacagaagccggctaccagcctgaactcgcatacttcgagtgtctgcacgaactgaagttgatcgtagacttgatgtatgaagaaggattggcgggcatgagatactctatctccgatacggctcaatggggagattttgtctcagggccgcgcgtagtcgatgcaaaggtaaaagaatcgatgaaacaagtattaacagatattcaaaacggtacattcgcgaaagaatggatcgtggaaaaccaagtgaaccgtcctcgcttcaatgcgatcaatgcaagtgaaaacgagcatcagattgaaaaggtcggcagacagcttcgtgaaatgatgccgtttgtcaaacaaggcaaaaagaaggaagcggtggtctccgttgcgcaaaattaatgttttcgacacgacccttcgtgacggtgaacaatcccccggggtcaacctcaattcccgggagaaactggcgatagccaagcagcttgaaagactcggggtggatattattgaagcgggatttcccgcttcatcccgaggtgattttttagccgtgcaggaaatcgcaagaacgattaaaaattgttcggtaacagggcttgcccgatctgtcaaaggtgacatcgacgcagcctgggaagcgctgaaagacggggccagcccgcggattcacatctttatcgccacctctgacattcatctgaagcataagctgaaaatgacgcgggaagaggttaaggaaaaagcggttgaaatggtgaagtatgcaaaagaacgctttccgatcgttcaatggtcagcagaagacgcatgccgcaccgaacttccgtttctggctgaaatcgttgaagaagtgattgatgccggcgcgagcgtcatcaacctgccggacactgtaggttacctgacgccggctgaatacggaaacatctttaaatatatgaaggaacacgttccgaatatcagccgggtaaagctatcagcccattgccacgatgatctcggaatggcggttgccaactcactttcggcaattgagaacggcgctgatcaaattgaatgcgccattaacggcataggagaaagagccgggaacgccgcgctagaggaaatcgccgttgcgcttcatgtcagaaatgacgcgcatcaagccgattcatctctcaatcttcatgaattgaagcggacgagtgatcttgtcagcaaactgacgggtatggcagttccccgcaacaaagcaatcgtcggagataacgctttcgcacatgagtccggcattcaccaagacggtttcctgaaagaaaaatcaacatatgaaatcatttcaccggaacttgtcggcgtgactgctgatgcacttgtactcggaaagcattccgggcgccacgcgttcaaagaccgcctgaatacgcttggattccagtttgatagtgatgaaatcaataaatattttacgatgtttaaagaactgaccgcaaagaaaaaagaaatcactgatgatgacttgatttctcttattttagaagaaaaagtgacagacaaaaaaatcggctatgaatttttgtctctgcaagtgcattacgggacgtctcaggtgccgactgcaacagtctctttaaaaaatcaggaaaacgaacagctgatgcaagaggcggcaacgggggcgggcagcgtagaagccgtttataatacgctcgggcgctgcatcgataaaaatattgaactgacagactaccgcattcaatccaaccggaaaggcgaagacgcgctggctcaagtttttgtcagagtgaccgtgaacggaaaagaatcatcagggcggggaatcgcgcaggatgttctggaagcttctgcaaaagcatatttgaacgccgtgaaccggcaattggtgctggattgcaatatagacggattaaagagacagactgcggtcggctcgtaatagaaaggagaacgtttgatttgaaaaaacgcattgctttgcttcccggtgacggaatcggaccggaagtggcggaatcagcggcagatgtattgaaaagcgttgccgaacaattcggacatgaatttgaatttgaaaacggactgatcgggggagcggccattgacgcccatcaaaactcccttcctgaggagacggtggctctttgtgaaagatccgacgccatcctgctcggggcagtcggcgggccgaaatgggaccaaaatcctccggagctcagaccggaaaaaggcctgctcggcatcagaaaaaaactcggcctgtttgccaatctgcgtcccgtgaccgtatttgaaagcttgtctgaggcgtctccgctgaaaaaagaatatatcagcggcgtcgactttgtaatcgtcagggaactgacgggcggcctctactttggagaaccgagcagacagtatgtcaatgaagcgggagaaaaggaagcggtcgatacccttttttataagaaagaagaaatcgcacgcgttgtaagagaagcttttaagatggctgccggcagaaaaggaaaagtgacgtccgttgataaggcgaatgtgctttcttcaagcaggctttggcgggaaacagcggatgaaatcgcaaaagaatttcctgatgtgacgcttgaacatatgcttgtcgataatgccgcgatgcagctcatctacgctccgagccagtttgacgtcatcgtaactgagaatatgttcggcgatattttaagcgatgaagcctccatgctgacaggctcgctcggcatgctgccgtcagccagcttatcaagttcaggtcttcacttgtttgaacccgtgcatggatctgcgcctgacatcgccggtaaagggatggccaatccgtttgcggcgattttatcagcggcgatgcttttgagaacatctttcgggcttgaaaacgaagcgcaggcggtggaaaaagcggtcgcaaaggtgcttgcagatggcagccgtacacgtgatatcgcccgggacggccaatatgccggaacgcatgacattactgaaaaagtaaaagccgcattagccggctcgaatacaaaatctatattgtgacgctttaaagaaagcggtcttagttcataggtagagggaggaaacaaagatgatgcctcgaacaatcatcgaaaagatttgggatcggcatgttgtaaaaagcggtgaaggaaaacccgaccttctctatattgatctgcacttaattcatgaggtgacgtctcctcaggcgtttgaagggttaaggcagaagggaagaaaggtcagacggccgcagaacacattcgcaacgatggaccacaatattccgaccgtcaaccgttttgacattaaagatgaagtcgcaaagcgccaagtaaccgcgcttgaacggaattgtgaggagttcggcgtccgtcttgcggatcttcacagcgcagatcagggaatcgttcacgtggtcgggcctgagcttggtctgacacttccgggaaaaacgatcgtttgcggagacagccatacatcgactcacggcgcgttcggagcgcttgccttcggtatcggcacaagtgaggtggaacatgttctttccactcagacactatggcagcagcggccgaaaacgcttgaaatccgtgttgacggaacgctccaaaaaggagtgaccgcgaaggatgtcatcttgtcggtcatcggaaaatacggggtgaaattcggtaccggatatgtcattgaatacaccggggaagtattcagaaacatgtctatggacgaacgcatgacggtctgcaatatgtcaatagaagcgggagcacgggcgggactgatcgctccggatgacacgacgattgaatattgtaaaaaccgtaaatacgcgccaaaaggcgaggaatttgaaaaagccgccgcagaatggaaagcgttaaaaaccgatccgggcgccgtatacgatcattccatcgtgttagacggcagcgagatttctccaatggtaacatggggcgtcaatcccggcatggttcttccggtcgatgcccaaataccggcgccggaaacgattgattctgaagacggtaaaaaagaagccatccgcgcgtacgaatacatgggaatctcaccgaatcaaaaaattgaagatattaaagtcgagcatgtgtttatcggctcctgtacaaattcgcggatgaccgatcttcgccaggctgcggatatgatcaaaggccgaaaagtcgccgacagcgtcagagccattgtggtgccgggttctcaaagcgtgaaacagcaggccgaagaagaagggctgcaccgcgtgtttctcgaggccggatttgaatggagagaatcaggctgcagcatgtgcctcagtatgaacaatgatgttgtgcctgaaggggaacgatgcgcttccacttccaaccgcaacttcgaaggcagacagggaaaaggcgcgagaacacaccttgtcagtccggcgatggcggcaatggcagccattcacgggcatttcgtcgatgtaagaaagttttatcaagaaaaaacagttgtgtaaggagtgcgcgaaaagatggaacctttaaaaacgcatacgggaaaagcggccgtcttaaaccggatcaacgtcgatacggaccagattattccgaaacagtttttgaaaagaattgaaagaaccggatacggcagattcgcgttttttgattggagataccttgagaacggtgagcctgatcctgaatttgagttaaaccgcaaagtctatgaaggcgcgtccatattaattgccggagagaatttcggctgcgggtcatcccgtgagcacgctccttgggcgctggatgattacggcttcaaaatcatcattgctccgtcatttgccgatatttttcatcaaaactgttttaaaaacggtatgcttcccatccgtatgccgtatgatcagtggaaaaaactcgccggtcaatatgaaaatcagtctcttaacatgacggttgatttggaaaaccagctcattcacgacagtgaaggcaaagagatttcatttgaagtcgatcctcactggaaggaaatgctgataaacggctatgatgaaatttcattaacgcttctgctggaggacgacattcagcagtttgaatcgaaaagaagttcatggcttcaagcctgaaaaaagccgcccggcatctgtccggcggctttttttaccgtgcgcaccatcctttcttgtgtttcctgacgcgtgttgatacacttgaacaaaatagcgcctgaaaggaaataaagtatgacgcatgacaagaaaaaagctgatatcattcctttcccccgtctgaaagaacgcttggttgataaagggatggccgccatgaaggataaacagtatcaggaggccctcgaactgttttcagaggcggtaagccacggcgataccgagtccgacgtgcatttaggcatggcgatttgttttctggaactcggggaattggaagaagcaaaacaagtttgcgagaaaatgctgaatgaagggtacggccattatttcaccgtactgcaggtgtacatgaccattttaattcagctgaaacaatatgaagaagtcaaaagcacaattgaagctgtgctggaagaaaaccagctgcccgcagaaagtgcggagcaattctaccggctgctcgaattcagccgcaaaatgaccgatcccgaccagcaggatgaagcgtgggaggaatacgaggacattcttgatgcggaaaaagtgctgaacaaccccgctgaacaaatgaatctgattcattctctcaaagaccgcaatattgcaaaatacacgggtctcttaaaaacgattcttcaagatccgggcgcacatccgcttatcaaaacgatgattttgacgctgatggcggagcacgactacagcaagccggttcatattacaaaattcggcgattcaatgaccgcggttccgagtgaaacggttcagcctgatacggctccgattttgcatcgtgttctccgggtgcttgatgaaacgctcggcaatgaaaaccctacattatacgctgccgtcgaggagctgtggagaaggcatctgtacgtcctgcacccttttatgccgaagtttttgaacgcagatttatgggcggcggcgcttcataaggtcggttacgagatgcacggcattgacattgagctggaggaacttcatatgatgtacgagtttgacagccgcgaacttgaagaagcctgcacgatgattaaggatattgaagaaatttcttatttgtaaatcacaccatatagttgaaagcggtaggcgttatgttataatatagtggttgtatttatgtatagcggtttaactgaaatgagaattacggttggacaggctgccagttcattacataatgattctgattcaagcggttttttctttgacaaagccgcggattgctttagaatggaagaccgacacaacctgaatagatttttggagggaaacacatgtctgtaaaatgggaaaaacaagaaggcaacgaaggcgtattaacggttgaagttgacgcggatacgttcaaaacagctcttgatgatgcatttaaaaaagtagtaaaacaggtttctattcctggattccgcaaagggaaagttccccgcggtttattcgaacagcgtttcggcgttgaagctctttaccaggatgctttagatattttacttcctgtagaataccctaaagcggttgaagaagccggcatcgaacctgtagaccgccctgaaatcgatgttgaaaaaatcgaaaaaggcgaaagcttgattttcactgcaaaagtgactgtaaaaccggaagtgaaacttggcgactacaaaggcttaggaatcgaaaaagatgacactgccgttactgacgaagatgtacaaaacgaacttaaagctcttcaagagcgtcaggctgagcttgtcgtgaaagaagaaggcgctgttgaaaacggcgacacagtcgttcttgacttcgaaggtttcgttgacggcgaagcgtttgaaggcggaaaagctgagaactactcacttgaagtaggatcaggttcattcatcccgggcttcgaagagcagttaacaggccttgaagcaggcgctgaaaaggatgttgaagtaacattccctgaagagtaccacgctgaagagcttgccggaaaaccagctgttttcaaagtgaaaattcatgaaatcaaagcgaaagagcttcctgagcttaacgacgaattcgcaaaagacattgacgaagaagttgaaacgcttgctgaattaactgagaaaacaaaaaaacgccttgaagaagcaaaagaaaacgaagctgacgctaaattgcgtgaagagcttgttctgaaagcatctgaaaacgctgaagctgatgttcctcaagcgatgatcgacactgagcttgaccgcatgctgaaagaattcgaacagcgtctgcaaatgcaaggcatgaaccttgagctttacactcaattctcaggccaagacgaaaacgcgttaaaagagcaaatgaaagaagatgccgcaaaacgcgtaaaatcaaacctgactcttgaagcgatcgctcaagctgaaaaccttgaagtaacggacgaagaagttgaagctgagctgactaaaatggctgaagcttacaacatgccggttgaaaacatcaagcaggcaatcggttcaactgacgcgatgaaagaagatttaaaagttcgaaaagcaattgattttcttgtagaaaaccgttaatatggttcataataatagacataataaaacagggcgcgattaattcgtgccttgttttgtacaattatgatataactctttttcttggggcaagatagtcattgccgggctgtttttcgtcatacatatagaatgtgcaagtgcgaaacacattgttaccgtcttactggaaagtatggtaaaatgcaatacatactcgatcgtagcaagaaccgttttcttttgcccttcaggtaaaagaaaaagtgagacaagattaaggggtgaaagaatgtttaaattcaacgaggaaaaaggacaattgaaatgctcgttctgcggaaaaacgcaagatcaggttcgtaagctggttgcaggaccgggtgtatatatatgcgacgaatgtattgagctctgtacagaaatcgtagaggaagagcttggtacagaagaagaagtcgaatttaaagacgttccgaagccgcaggaaatccgtgagattctgaatgaatatgtcatcggacaggatcaggcgaagaaatcacttgcggttgcggtatacaaccattacaaacgcatcaactccaacagtaaagtggatgatgtcgagctttctaaaagtaatatttctttaatcggaccgactggaagcgggaaaacacttcttgcccagacgcttgcgcgtattctgaacgtgccgtttgcgatcgcggacgctacatctctgactgaagccggatatgtcggtgaggacgtagaaaacatcctcctcaagctgattcaggcagcagactatgatgtggaaaaagcagaaaaaggcattatttatatcgatgaaatcgataaagtagcgcgaaaatctgaaaacccgtccattacacgcgacgtatcaggcgaaggcgttcagcaggcgctgctgaaaattcttgaaggaacggttgcaagcgtgccgcctcaaggaggacgcaaacatcctcatcaggaattcatccagatcgatacgacgaacatcctgttcatttgcggcggtgcatttgacggcatcgaacaaatcatcaaacgccgtctcggacaaaaagtcatcggcttcggctcagataataaagcggcagaccttgaaaaagaagaactgctttctaaagttcttccggaagacttgctccgtttcggtctgattcctgaattcatcggccgtcttcctgtcattgcaagccttgagcagcttgacgaaacggcactggttgaaattctgactaaaccgaaaaacgcactcgtcaaacaatacaagaaaatgttagaacttgatgatgtcgagcttgaatttgaagacgaggcattatctgaaattgcgaaaaaagcgatcgagcgtaaaacaggcgcacgcggcctgcgttctatcattgaaggcatcatgcttgacgtcatgtttgatctgccgtcccgcgatgatattgaaaaatgtgtcattaccggagcgacagtcgcagacggtgaagcaccgcgtcttgtattaaaagacggcacagttgtcggccaagataaaacatcagcataacatgacaaaacctcctgactcgaattgatcaggaggtttttttcttgtcctgacccttctgaaaatgtttattccgggctttgctgggagatactagcggacagaggaatgaattggatacataaatcgttttttcaggagggaccagcatgagttggacagggatcgcattatttgtacagctgtttttcgggatagtcatcggattatatttttggaatctgctcaaaaaccagcgtacacaaaaagtgacgatagataaagaatcaaaaaaagaaatggaacagctgcgcaaaatgcgcgccatcagtttatcagaacctttatcagaaaaggtgcggccgaaaagctttcaggacattgtcggccaggaagacggaattaaagcgttaaaagcagcgctttgcggaccgaacccgcagcacgtcattatttacggtcctccgggagtcggaaaaacggctgcggcgcggctggtattggaagaagcgaaaaaacataaacagtcaccgtttcaaaagcaggctgtttttgttgaacttgatgcgacgaccgcgcggtttgatgaacgggggattgccgatccgcttatcggttcagtgcatgatccgatttatcagggagcgggagcgatgggccaggcaggcattccgcagccgaaacagggggctgtgacccatgctcacggcggggtattgtttattgatgaaatcggcgagcttcatccgattcagatgaataaaatgctgaaggtgcttgaagatcgaaaagtatttttagacagtgcgtattacagtgaagaaaatacgcaaataccgaatcacattcatgatatttttcaaaatgggcttccggcagatttccgtttgatcggagcgacaacgagaatgccgaatgaaattccgccggccatccgttcgcgctgtcttgaagtatttttccgcgagctggaaaaggatgaacttaaaatcgttgcgaaaaaagcagccgacaaaattcagaaagagatttctgacgaagctctcagtgtgctgaccacatatacgagaaacggacgtgaagccgtcaatatgatccagatcgccgccggcatggcggtgactgaggacagaaaagaaattacgacagaagatatagaatgggttgttcattccagtcagcttacacctaaaaatgagcagaaaatcgccgatgaaccgcaagtcggcatcgtgaacggacttgccgtctacgggccgaacagcggcgcattgctggaaatcgaagtgaatgtcacacctgcgcaggacaaaggaagcctgaatatcacgggaattgcagaggaagaaagcatcggcagccaatcaaagtcgatccgccgcaaaagcatggcgaagggatccgtggaaaatgttctgacggttctccgcacaatgggcatcaaaccttcagactatgacattcacgtcaattttccgggcggaggtccgattgacggaccttcagcaggtatcgcgatggctgcggggattttttccgcgattcaccgcatcccgatcgaccatacggtggcgatgacgggagaaatcagcctgacggggcttgtcaaaccgatcggcggcgtcattccgaaaattaaagccgcaaaacaggccggagcaaaaacggtcattatcccatatgaaaatcagcagtccattctgaaacgaatagacggaatcaccattaaagcggtaaaaacgttccaggaagtgctggacgtcatattggttgaccctccttcagaacaaaaaccgtttgatatccaaatgaataaagaatccgtataaaccccatttttataatggggtttttttatggaggacatcttttcctttttcagaacagaaagaaagggtatactacgaagagactgttttatatacagggcaggcggataagccgattaaagcccgatcccggaattgtacaacgatgaaaaagttgtattataatggttcatactaaagtcacggaggtgtcagtcacatggcagaagatacaaaacgcagcatcccgctcctccctttaagaggcttattggtatacccgacaatggttttacatttagatgtaggccgtgacaagtcggttcaggctcttgaacaggcaatgatgcatgatcatatgatttttttagccactcagcaggatatttcgatagacgaaccgggtgaagaggatattttcgccgtcggcacttatacaaaaattaaacagatgctgaagctgcccaacggtacgatcagagtgcttgtagaaggaattcagcgggcgcagatccttgaatacaccgaactcgaagattatacttcggtcgatatacagctgatgcatgaggatgattcaaaagacgtggaagacgaagcgcttatgcggacgctgctggaccattttgaccagtacataaaaatttctaaaaaaatctccgcagaaacgtatgcggctgtgactgatattgaagagcccggcagaatggcggatatcgtcgcttctcatctcccgctgaaattaaaggacaagcaggacattttagaaacggcggatattaaagaacgtctgaataaggtcatccgttccattcataatgaaaaagaagtgctggagattgagaaaaaaatcggtcagcgcgtcaaacgttcgatggaacgcactcaaaaggaatactacttgcgtgaacagatgaaagccattcagaaggagcttggcgacaaagaaggaaaaaccggcgaagttcagtcgctcacggaaaagatagaagaagcaggcatgcctgagcgtgtcaaagaaacggcgcttaaggaattaagccgttacgaaaaagtgccgtcaagctcagcggaaagctctgttatccgcaactatattgactggctcatcgcccttccgtggtcggatgaaacagaagataaacttgatattaaaaaagccggggaaatcttagataaagagcaccacggcttagagaaagtgaaagagcggattttggagtatttggccgtgaaacagctgacgaaaacgctgaaagggccgattctttgtctggccggacctccgggagtcggtaaaacatctcttgcaaaatcaatcagtacgagcatggggcgccgttttgtgagaatttcactgggcggagtgcgcgatgagtctgaaatccgcgggcaccggcgtacatacgtcggagcgatgccgggccgtattatacaggggatgaaaaaagccggtaaacaaaatccggtctttctcctggatgagatcgacaaaatgtcgtctgatttcagaggcgatccgtcttcggcgatgcttgaggtgctggatccggaacaaaacagcacattcagcgaccactatattgaagagacgttcgatttatcgaaagtgctgtttatcgcgactgcgaataaccttgcttccataccgggacctctcagagacagaatggagattatcagcctgtcaggctacactgaaaacgaaaagctggagatcgtgaaggaccacctgcttccgaaacaaatcaaagagcacgggctcacaaagagcaacctgcagattcgggaccaggcgattacggacatcatccgctactacacgagggaagccggcgtgagaacgcttgaacgccagattgccgccatttgccgaaaggctgcaaaagccattgtgtctgaggagagaaaacgcattaccgttacagagaaaaatctggccgactatctcggaaaacggatattcagatacggacaggcggaaaccgaagatcaaatcggggttgtcacggggcttgcgtatacgacggtcggcggagatacgctgtcaatcgaagtgtcattgtcaccgggaaaaggaaagctgattctgaccgggaagcttggagatgtcatgcgggaatcagcgcaggccgctttcagttatgtccgctcgaaagcggaacagttcggaatcgatccgaaattccatgagaagtatgacattcatatccatgtccctgaaggagcggtgccgaaagacggcccttctgccggaattacgatggccacggcgctcgtttcagcattaacggaccgtgcggtaaaacgcgaagtcggtatgacgggagaaattacgctgcggggccgcgtgcttccgatcggcggactgaaagaaaaggcgctcggcgcgcacagagcgggcctgaccactattattgcgcctaaagataacgaaaaagatataaaggatattccagaaagcgtcagagaaggactgaagtttatattcgtttctcacctggatgacgttttggaacatgccttagtaggagagaagaaatgaaagtcacaaagtcagaaatcgtgatcagcgcggtcaaacccgaacagtaccctgatggggggcttccggaaatcgcgctggcgggaagatcaaatgtaggaaagtcatcttttatcaattcattaatcaatcggaaaaacttggccagaacgtcatcaaaaccggggaaaacacagaccttaaacttttacatcatcaatgatgaattgcattttgtcgacgttcccgggtacggatttgcgaaagtttccaaaagcgagcgggaagcatgggggagaatgattgaaacctatatgacgacccgcgaagagctgaaagcctgcgtgcagattgtcgacctcaggcacgcgccgtctgctgaagacgtgaacatgtatgaattcctgaagtattacggcattcccgtcatcgttatcgcgacaaaagcggataagattccaaaaggaaaatgggacaagcacttaaaggttgtcaaacagacgcttgatatggatcctgaagacgagctgattttattttcctctgaaacgaaaaaaggcaaagatgaagcatggggagccattaaaaaaatgatcagccggtaatgaaaaacccaaaacgcagtgcgttttgggttttatcgtatagttttgttccgcttgataaacaataataaaaggctgattccgatgaaaacatacggccagtatgttttgaagtgttccgtcggaatatggacggactccagccacgccgtaatttgtttaaagaagtataaaaagagggaaaaaccaatcatggcaaccgcttcgtatacatattcttttctggctgccgcaaataaggagaatccgaagacgaagagaatcatttcaaaatctcccggccaccatgagagctcaggtttggtgaaaaagtgtaaacctatgccgaaaagaagcatgccgatcaggacgtgaggcccggccgcttcctttttgccctgatacaagagcgcagcgcccaaaagcataaggagcaccggccattccccctgattcgcaaacaggtgaacctgtccgctctgaagccatgcgaataatgaagcggcaagcagaagtcccggtaataaaattgatgtttttttcatcctgtcacctacccgcagtaaaggatttttagtatgatgattacagtggaaacgagctttttatactatagcataacatttttgaaatctgttcacattttcccgaagaaactatgttataattattataaataataaattctatgttagaatgattataaataaattgcgatgtacgggggtgcatgaaagcgatgcatattcttgttgtgggagtagattataaatccgcccctattgaaatacgcgaaaaaataagttttcagccggatgagcttgcagaagcgatgctccgtttaaaaggagaaaaaagtgttcttgaaaacattatcgtgtcaacctgcaaccgcaccgaaatatatgcggtggtcgaccagcttcataccggccgttattatataaagacatttttatccgaatggttctcgctgccgaaagaagagctgtctccgtttctgaaattttatgagagcgatgcggcgatcgagcatttattccgtgtggcatgcggcttggattccatggtcatcggagaaacgcaaatactcggccaggtccgctcaagctttaaaacggcgcaggccgaaaagacgatcggcaccattttcaatgagctgtttaaacaggcggtcaccgtcggcaaacgcacgcatgccgaaaccgatatcggcgccaatgccgtttccgtcagttacgccgccgttgaactcgcgaaaaaaatcttcggctcattgtcaaataagcacattttgattctcggtgcgggaaaaatgggcgagcttgccgcagaaaacctgcacggtcagggtatcggcaaagtaacggtcatcaacagaacgtttttgaaggcaaaagcgcttgctgaccgtttctccggagaagcgcgcagcttaaaccagcttgaacatgcacttgctgaagctgatattttaatcagttcgacaggcgcaagtgatttcgtcgtgtctaaagaaatgatggagagagcgggcagacagcggaaaggccgtccgttatttatggtggatatcgctgtgccgcgagacctcgatccggcgctgaacgatcttgaaggtgtttttctgtacgatattgatgaccttgaaggaatcgttgaagccaacttacaagaacgccgtgaaaccgctgaaaaagtcgagctgtttattgaagcggcaattgttgagtttaagcagtggcttaatacgctcggcgttgtgccggtcatttcggcgctgcgtgaaaaggcgctgtccatccagtccgatacgatgcagagcattgagcgcaagctgcctcatctgacggtaagagagaaaaaacttctcagcaaacatacgaaaagcatcattaaccaaatgctgcgcgacccgattctgaaagcgaaagagcttgcggctgaagcggattcagatgaaaagctgaagctgtttatgcagatattcgatattgaggaagaggccggccgccagctggacaaaagcctggataaccgccagacggttcattcgtttcaaaaggcagaagcaaaaacgggcttacgtccgcttgtaagtgagtgagggctgtatgattgatacagcaatggcaagacttaatgaagcgacaattgttatttatgcagtaagcgtccttttttactttatagattttcttcaacacaaccggaaggctgggaaaatggccttctggttgctttctattgtctggactctgcaaaccgtctatctttcttatttcatgtggcagacgggcagatttccggtcttgaatattacggaggccctttacttttatgcgtgggtgcttgtcacgctctcacttgtggtcacgcagattctgcgggttgattttatcgtgtttttcacgaatgtcatcggtttctcgatgattgcgatccatacgttttcaccgacggatcagcattcggccgctttttccggccagctggtctcagagcttttggtcattcatattacaatggcgattctgtcttacggcgctttttccctttcttttgtcttttcgcttctttatcagtttcaatattctttattaaagaagaaaaagtggggaaaatggctgttgagaattgaagatttgtcaaaacttgattatatggcttacgttttaaatgtcatcggggttccgatgctgctgttgagcctgatattaggcgtgatctgggcgtatgtgtcgctggaaacgctgtactggtttgattcaaaagtgctcggttcgtttattgtgctgcttttatacagctactatttatatatcagaatgattaaggaactgcagggaaaagtggcggcgttatggaattcagcatgttttctcgtgctgatgattaattacttcctgctcggaagcctgtcgcaattccattggttcagttaacgcacgcgcccaaacagattcgggaggaaagaaaatgagaacgattaaggtaggttccagacggagcaaactggctatgacccagacaaaatgggtgattaacaaactgaaggaattgaacccttcctataactttgaaatccgggagattgtcacaaaaggcgaccgcatccttgatgttacactgtcaaaagtgggcggcaaaggtttgtttgtcaaagagattgaacaggcgctgctgcatcaggagattgatatggcggttcacagcatgaaagacatgcccgccgttttgcctgagggtcttgtcataggctgcataccgaaacgtgaggatccgcgtgatgcgctgatttcaaaggggcatcaaaagctggacgacataaaagaaggaggcatcatcggcaccagcagtttaagaagaagcgcccagattcttgctgaacgcccagatcttacaattaagtggatcagaggcaatattgatacgagacttcaaaagcttgaaacggaagattacgatgctattattttagcggctgcgggactttcgagaatgggctggaaagatgatgtcgtatctgaatttctcgaaccggaccgctgtctgcctgcggtcggccaaggcgctcttgccattgaatgcagagagtcggatgaggagcttttgaagctgtttgcgcaatttaccgatgagtatacgcagcgcacggtggcagccgaacgggctttcttacacgcgatggaaggcggctgccaagtgccgatagccgggtatgcgtccgtcaatgaccgggatgaggttgaattggtcggtcttgtcgcgtctccggacggaaagacgatttataaagaaacagcggcgggacatgatccggaagaaatcggaaaacgctgtgcggcgatgatgtctgaaaaaggagccaaagcactaatcgacagcgtgaaacaggagctcgatcaggatggcaaatgaccttcctttacaaggaaagaccgtgcttgtcactcggaacaaaagacaggccgctccgttccgaaaaaaagtagaggcgctcggcggaacggctgtttccgcttcgctgatcgcttttcaggaagcgctcccggatgaatgtgcggacagtctgcgggaagacctttctgagccgggatggcttgtgtttacaagcgtaaacggtgtccggttctttttttcctatcttgatcgtcacggtcttgcgctttcgggacggaaaaaaatcgcagccgtcggtgaaaagactgcgcgcgccctgaaagagcggggagcccggacggatgcgatgcctgacgagtatgtggcggaatgtctggctgatactttaaaacggcacgcatcagctgccgaacccatttcagtgataaagggcaatttatcacgcgatgtcataaaagcggagcttgagccgcatggctatcaaataagggaatgggtgttatacaataccattcaggatgaaaaaggcatggacgagctgagacgggctgcatcccgctctcattttgattttattacgtttaccagctcatcggcggtgcatacgtttatgcacgcggtcggagacggagaaaaagcgtgggaaaacagcggtgcgagctatatcagcatcggccctttgacagagaaagcgctcttggaatacgggatctcatcccatgtgcctgacacttatacgattgaaggcatgctggacgtcatgtgcagcatgtcgggaaaggattgataatgatgaatcaaacatttaacagacaccgccgtttgcgcgcgaacgctgcgatgagagatttagtaaaagaaacacgtcttcacccctcagattttatttacccgttatttgtcgttgaaggactcgaaggaaaaaaagaagttccttccatgccgggggtttatcatgtatcactcgatttgttaaaggatgaaatggctgagctgatatcgctcggcattaagtcggtcatcgttttcggcgtgccggaagaaaaagacgcctgcggaacccaggcttttcatgatcacggcattgtgcagaaagggattgctgaaattaaaaagcattatcctgaaatgatcgtaatcgctgatacgtgtctctgtgaatacacggatcacggccattgcggcgtcgtgaaagacggagaaatcctcaatgacgagtcgcttgaactgctggctcagacagccgtcagccaggccaaagccggcgctgacatcatcgctccttcaaatatgatggacggttttgtcacagtgatcagggaagcgctcgacaaagaaggattcacgaatattccgatcatgtcttatgccgtgaaatattcaagtgaattttacggtccgttccgcgacgcggctgacagcacgccgcagttcggagaccgaaaaacatatcagatggatccggccaaccgcttggaagcgctccgtgaggctgaatcagacgcggcagaaggcgctgactttttaatcgtcaaaccgtctatgtcatacttagatattatgcgtgatgtgaaaaaccgccatcacctgccgctggtcgcatataatgtgagcggggagtattccatggtgaaagcggcagcccaaaacggctggattaaagaaaaagaaatggtgctggaaattttaacgggcatgaaacgtgcaggagccgatctgattatgacgtatcatgcaaaagacgcagcaaaatggcttgctgagtaacgatttcatttgacgggagctgaggcagatgagaagctatgaaaaatcaaaagccgcttttaaagaagcgcagaaactgatgccgggcggagtgaacagcccggtgcgcgcgtttaaatcagtcgatatggatccgatttttatgcagcgcggaaaaggatcgaaaatatttgatattgacggcaatgaatatatcgactacgtcctgagctgggggccgctcattttgggccacacgaacgaccgggtcgttgaaagcctgaaaaaagtagccgagaacgggacaagtttcggagcatctactgaagtggaaaacgaactggccaaattggtcattgaccgtgtgccgtctgttgaaatcgtgcggatggtcagctccggcacagaggcgacaatgagcgccctgcgtctggcaagaggatataccggccgcaacaaaattttgaaattcgaaggctgttaccacggccatggtgattcactgctgatcaaagcgggatccggagtggcgacactcggccttccggacagcccgggcgtgccggaaggaatagcaatgaatacgatcaccgttccatacaacgatttggaaagcgttgcactcgcattccgggaatacggtgaagatattgccggggtcattgttgaaccggtagcaggcaatatgggcgttgttccgccgcaggaaggctttttacaagggctgcgcgacatgacggaacagtatggcgcgctgctcatttttgatgaggtcatgaccggttttcgcgtggattataactgtgcgcaagggtatttcggcgtgacgcctgacttaacgtgtctcggcaaagtcataggcggcggtcttcctgtcggtgcgtatggcggaaaagctgacattatggaacgaatcgcgccgagcggtccgatctatcaggctggaacattgtcaggaaatccgcttgccatgacagcgggacttgagacgttacagcagctcacacctgaatcttaccaagaatttgtgaaaaaaggcgatatgcttgaagaaggcatttcaaaagcagctgaagcacatggcattccgcacacgtttaaccgggcgggttcaatgatcggcttctttttcacaaatgagcctgtcattaactatgaagcagccaaatcttctgatttaaagctgttcgccaaatattataaagggatggccgacgcaggcgtatttctgcctccgtctcaatttgaaggattgtttctctccactgcgcatacaatggaggatattgaaaataccattcaagccgctgagaaagtgttccaggcgatcagccgctgatacagaaaagccgatgcaagcaagacttgtatcggcttttttcaatgcctccattatcatattttcccggattgcggcatacacctttagtgacatctaattgtatggattagatgaaaggaggatatgaacttgccgcataatcaccgattgcaattttctgttgaagaatcaatctgtttccaaaaaggacaggaagtttctgaattactttcgatttcgttagaccctgacatcagggtgcaggaagtaaatgattatgtctcaattaaaggatcattagaacttactggcgagtacaacatagatcacagcagtcattttgaagagcttgatagggagctgaggcatgtagaggaagtgagggcgagggaggatggcacggccgagctcattcattgtttcccggtggacattacgattccgaaaaataaagtgagccacctcaatgatgttttcgtatttatcgatgcctttgattatcagctgacggattcaaggatcttaaccattcaggctgatttggcaattgaagggctgcttgaggaatccgagccaaaagagccggagatccctctgtacgtggcgcctgaatttgccagagaagaaatgatcaatcttgccggacatcattcggaggacgaaaacgaaccagaattaatgatacgccatgagcctgaaatacctttgactgtatcaaaagaagcagcacaagaaaccgagaagaacgaggaagaaacccagcctttactcaggcaggaggaagaagagcaggaaactgcctctattctgagggaacgggaagaagaagagcaggaaactgtcccgattctgagggagcgggaagaagaagagcaggaagcagccccgattctgagagagcaggaagaagaagagcaggaagcagccccgattctgagggaacgggaagaagaagagcaggaagcagccccgattttgagggagcacaaagaagaagaggaagaaactgccccgattctgagggagcaggaagaagaagagaaagaaactgccccgattttgagggagcaggaagaagaagagcaggagactgccctgattctgagggagcaggaagaagaagagcaggaagcagccccgattttgagggagcgggaagaagaagagcaggaagcagccccgattttgagggagcgggaagaagaagagcgggagactgccccgattctgagggagcaggaagaggtgccgaaacctgtttcctttactgagcctcctcctcccgtttctttccaacacgaagaagagccggaagaagctgaggagcctgcaatcatgtcggctgtgaggaatgaacctgtatttgaggatgattcagcagaagtccaggaagagccaaaagatgatatcgaaaaggttttccctgcgttcactctgactccgcatgcagaaaaaccaaaaattgcggaacagcccttccttcaaaaagaagagcagccagaggccgagccgcttctccgtcagagcgatcatgaggcggcagaagacgaagatgagcctgcggtttttcaagaagagcaggcgcccgtttatcgcgagttcgttccggaacggcaggaagaggagttttacagcgctcctaagctgcttgaagaagaggctcatgatgaagaagggtttgaaattgaggtaaggaagatggcgccgccggaggaggaaaccgggaagcctctcgatttgtcttttcagttttccaaactgccgcctgaggagccggcgcaagctgaaccgcctgagccgcttaagtctgaaagaaagaatgaagaagctgcaccgggaaccgagcagaaggaaaatgacaactcacattacttgacaaaattatttacaagggaagaagaaaagttttcaagaatgaaaatttgtatcgtacagcagcaagatactatcgaccgggtgtgtgaacgatatgacataacatcccagcagctcatcagaacgaatgctttatcgtttgatgacgagcttgaagaaggtcagcttctgtatatacctgaatataataacagccatgcgtaagcacaaagaggccgtaaaaatgtggtgaatggaatggaagcagtccaatcagtgcttcaggaatacgggctgtcggctgagtatattgagcctgtcagcccgcatgtttggaaggtctactcaaactacggcatttttgctttgaaacagctcaagccggcccgcagcagtgaatttacggatcttatgattgagattgaggagaaaggctaccgatcatttgtgccgatctgccgcacgtatgccggcgatttttttgcgggaagacagacggagaattcttattatttaatgccttggcttcagtacgatcaggaagaggaatgggatcaaaaacatgtttacctttttaaagaggttgcgaagctccactccgcgactgtgcgggacatccaaatccggactgaagatatcagcggcttttatgaagcaacgaaaagagattgggaaaatgataagcttgtctatgaacaattcgccgaccgggcggaaaaagagtggtatctttcaccttttgaactgcaggctgttacgtatcttacagaaacggtttctgccgtcaattttgctctcgaacgtctggaagaatggtttgacgcggcaaaggatcatgacaagacgagagcggtgatcaaccacggcagcttatcgagccgccactttctgtataatgatgcgggatcgggctttttcacgaatttcgagaaagctgcgctgggccctccgcaaaatgacctgctcggcttttactccagaatgttcagaagctatccgaaagcatgcccggagtgtctggactggttttatacgtatcacaaatcattcccgctccgtgaagcggaaatcagcctgtttctcagctatatggcttatccgtccgccatgtacaaagtgctgaaacggtatcagaccggccaaaggggctctgaaaaagaagagtgcacgcaattattaagagcgttttggcagatgaaaaatgttgagccttttctcatgaaggttcatcagattgagcgggagaaaaaaataaaagcggaaaacgagtcctcttcataacgggactcgtttttttatatccattccaaatgcagggcgcacgctaaaaacagcaggatggcaagcagcaggacatcaaaagtcgtcggaaagaaaatcgtcctgatcccctgaaagatcgtaatcgggataatgacttgcacggatacaaggcggacctgtctggcccactgggggagcgaataagaattgaatttttttctcacgggcaattcctcctcacattcgcctttctatgtatcgtatgtaagggaaagggcggggtgcatgcccatttatgtatgacggcagcggtttttggaaaagatgattgacgaatcaaaaacacttttactataataaagaacataataaataagatcatgagctgatataaatacacctgctttgaacgggaagagtacaagaaagacgcatgaagagagagaagctactgtgctgaaaggcttcttatgccgtctcattggaaggtcgcccgggagcataatttcttgaacatacagtagagaaattcgggccgcacccgttatccgtttaagtgcatgaacaaatctgttcatgaaaaaaggtggtaccgcgaaagagcttttcgtcctttatcaggatgaaggctcttttttagttgctcagccatttctaaacatgctggagggttatcatggatacaaacgaacaaacaatgccgacaaaatatgatccgtctgcgattgaaaaaggccgctatgatttttggctgaaaggaaaatattttgaagcgggcggcgatcaaacgaaacagccgtattctgtcgtcattccgccgccgaacgtgacgggcaggctgcacctcggacatgcgtgggatacgacgctgcaagatatcgttacgcgtatgaaacgcatgcagggctatgacgtgctctggcttccgggcatggaccacgccggcatcgccactcaggcaaaagtcgaagcgaaactccgcgaacagggcacaagccgttatgacctcggccgtgaaaagtttttagaagaaacgtggaagtggaaagaagagtatgctgatttcatccgcagccaatgggccaagatgggactcggactcgattattcgcgcgaacgttttactcttgatgaagggctgaacaaagccgtgcgggaagtattcgtcaagctgtacaaaaaaggcttgatttacagaggcgaatatatcatcaactgggaccctgccacaaaaacggctttatccgatattgaagtgatttacaaagacgtacagggcgcgttttatcatttgcgctatccgttagcagacggttcaggctcaattgaaatcgcgaccacccgtccggaaacgatgcttggcgacacggctgtcgcggttcatcctgaagatgagcgctacaagcacttaatcggcaaaacggtgattctgccgattacaaaccgcgaaattccgatcgtcggcgatgattatgttgatatggaattcggatcaggcgccgttaaaatcacgcctgcccatgacccgaatgactttgaactcggaaaccgccacaatttagagcggattctcgtcatgaatgaagacggaacaatgaatgaaaaagcgctgcaatataacggcatggatcggtttgaatgccgcaaaaaactcgtcaaagatcttcaggaatccggtgttctctttaaaatcgaagaccatatgcattctgtcggacatagtgagagaagcggcgccgttgttgagccgtacctgtccacacaatggtttgtcaaaatgcagccgctggccgatgctgcggttgaccttcagtcaaaagaagagaaagttcacttcgttcctgaccgtttcgagaaaacgtacctgcactggatggaaaatatccgtgattggtgtatttcccgtcagctgtggtggggccaccgcatcccggcttggtatcataaagaaacaaaagaagtgtacgtcggccttgaggcgcctgaggacagtgaaaattgggaacaggattcagacgtgcttgatacatggttcagctccgcgctttggccgttttctacaatgggctggcctgatgaaaacgctgaagactttaagcggtattactcaaccgatgttcttgtaacgggatatgacatcattttcttctgggtatcccggatgattttccaaggtcttgagtttaccggcgagcgtccgttcaaagacgtgctgattcacggcttaatccgtgacgagcagggcagaaaaatgagtaaatcccttgggaacggcgtggacccgatggatgtcatcgacaagtacggagcggattccctgcgctatttcctggcaaccggaagttcaccgggacaggatctccgtttcagctatgaaaaagtggaatccacatggaatttcgcaaataaaatttggaacgcctcccgttttgcattaatgaacatggacggcatgacgtatgacgagcttgatctgtccggtgaaaaatcagttgctgataagtggatcctcacaagactgaatgaaacgatagaagacgtaacccagcttgcggatcgttatgaattcggcgaagtcggacgccacctgtacaactttatctgggacgatgtgtgcgactggtatatcgaaatggcgaagcttccgctgtacggggaagatgaagcggcgaagaaaacaacccgttctgttctggcatacgtgcttgaccagacgatgcgtcttcttcacccgtttatgccattcttaacggaagaaatctggcagcaccttcctcatgaaggcgagtcaatcacgatcagctcttggccggttccggtgccggagcatacggataaagaggcagcggcggatatgaaactgctcgttgaattaatccgttctgtccgcaatatccggagcgaagtcaacacgccgatgagcaagcaggttgagctttatattaaaacagctaccgaagacattgccggccgccttgagaagaaccgttcttacgttgagcgctttacgaatccgagcacgctgaaaatcgggacggatatcactgcggcagacaaagcgatgacagcggtcgtcaccggagcggaagtcattctgccgcttgaagggctgattaacattgatgaggagatcgcccgtctgcaaaaagaattcgacaagctgacaaaagaggtcgaacgcgttcagaaaaaactcggcaacgaaggattcattaaaaaagctcctgagcatgtcattgaagaagaacgcggaaaagagaaagactacacggcaaaacgcgaagctgtccggcagcggattgcagagctgaaaggctgataaaacagcggggcggtttcctaagaaaccgccttgtcgtataaaagaggggatttcattgtttaatacgtacaaagaagcgatcagctggattcatggcagactcaagttcggcgttaagccgggccttctccgtatggaaaagctgatggaaaaactggaacacccggaaaagaacattcgcgccattcatgtggcgggcacaaacggcaaaggatcaaccgtcgcttttatccgttccgtgcttcaagaagccggttataaagtcggcacgttcacatcgccttacatcattacgtttaatgagcgtatcagcgtcaacggcacgccgatttctgatgaggaatggagaacgctcgttaatgacataaaaccgatagtcgatgagcttgataagaccgatgccggaacggtgacagaatttgaaatcattacagcgtgtgcatttttatattttgcgaagcgggctgatatcgattttgtcatttttgaagcggggctcggcggcacatttgattcaaccaatattgtgaatccgctcctgtcggtcattacaagtatcggacatgaccatatggcgattttaggcaataccatcgaggagatcgccgggcagaaagccggtatcattaaaaattccattccggtcattacgggcgtcaatcagccggaagcactcggcgttattgaagcggaagccgaaaaaaagcaggctccgtatcagtcactatataaaacgtgcagactgtttaatgaagcggcgcttccttccggtgaaagcttttcgctggaaacggaaacgaaatgctatgaaaacattcaaacgtcgctgatcggcattcaccaaagacagaatgcggcattggcgatattggccgctgaatggctgaatcgcatggaagccgcagccatttctgaagaagcgatacgaaacggcctgaaaaaagcatcgtggccgggccggtttgaacgtcttcaaagccgccctttagtgtttgcggacggcgcgcataacgaagagggcgttgaaacgctgacagaaacgatccggcagcgctttgccggtaaaaacgtccatgtcgtattcagcgcattaaaagacaaaccgtatcaggaaatgattaaaaagcttgaaaccgaagcggattccattcactttgtatcatttgactttccgcgtgcttcaagcgccgaagccctttataacgcaagcagtctagcggataagagcttcgatgagaacccggacagtgtgaaagaatggatagaacaaaaagacggggcggatgatgtcatcatcattaccggctccttatattttatttccgaaatgagaaagcggcttatctgacagcccctcggatgcccggcggaccattttacggttttgccgggtgtttttatgctgaaaatatattttcagccatttcagtcatggtgtttttctttgctataatctgagccagattgatagtaaaggtgtggtctgagtgcttttgattctgttttttctcggcttgattttcggttcttttttttatacagcagcgtgccgtatcccgctgcgaatctcggttatttcgccgcgttcagcctgttcgttttgccgcttgccgctctcctggggggagcttgtgcccgtcgtttcctatattctgcaaagaggcagatgcagaaactgccgtgcaaagctgtcggttatgtatccggcggcggaatgctggacggcgtgtttattcacggctgcaggcattcatttcggtttctcaaaagaactgttagtcgcgctgttatttctgtctctgctcatgattgttaccgtgacggatctgcaatatatgctgattcctgacaaggttctgctgttttttcttccgctttttatcgccggccgtatgttttctccgctggattcatggtatgcagggtttgccggagccgtttgcggattttttctgcttgtttttatcatgtttgtcagtaaaggaggcatcggcgcaggtgatgtgaaactgtttggggtgatcggcctgacgctcggcgtgaagctcgtgctcattgcattctttctttccgttatgatcggagccgtatacggtatgtgcgccgcagcccggggcaggcttggtaaaaagcagccatttccgtttgcgccggccatctcagccgggagcgctttgagttatttatacggtgaagagctgttttcgttttacatcaagctcgcttcaggcggggcttgaaaaatttggcgaacgttttttggacaagacgacaaaagtcttgttcttttttttttcgcctatgctaaagtgtgaaccatgatcagttcaaagtacggccaagacgaatgcaagggggaagagacgttgaaaaaaaggaagagcaaaaagcacagcaacgcaaaaaacaatgcccttaaagtaaccattaacggacaagaagaaacgatgtatggacaagaagatgtgaaagaaggcggggagaaaaccgtcacattttcaaattgggaagaaacaaaaaaggcggagcaggagaccgctgcatcccatgaagatccgaaagaagaagatttcaattgggatcatgagaagaattctgaggtatttgaagatgacccgaaagtcgttccgccataccagaagaaaaaaaacggccctcattttccgaaaaaaaagcagccgtcttctccagttaaaaaagcggtcacgacaattgctgttgcggctgttttaggcaccgggctcggccttgtcgccttaaatatgtcgggaagtaaagaagcctccgctccagcatcagctgacaaaggttcacaagggcagacggcgaaagcgggagatgtttctaaagacaaatctgaaacagccggcacaggagatgcggaatcttcagagggaaactataaaacatatgcggtgcaggccggaaaattttcatcagaaaaaggagcgcaaacccttgttgaccagctgactgaaaaaggatactcggccgtctctctggctaaagaagacggatacacatacgtgatcgccgggcttgcagcggaaaaaagcctatcacagcaattgggtcagacactgatagaccatgattttgaggcttggggcggaaaagagctcagctttgcggtcgattcaggactggaagactcttttaaacaagcatctgagctctccgccaaagcgattaccggcaaagatctttcaaaaacggaagtggctgaagcggcaaaagcggcagacggtgcagacgccgctgacaaaaagcagaaagaggccgtgcttcaagcgctgaaagaactggaaacgccgggttcggaatccggctggaaagcccaaaaagagcttttaagtgttgtaaaatagtatctcatttcccgtcatccggcgggattttttattttgtcatcaaaaagttatttttctgaaattgtggttgcccgtttgatttggtaggatagacaagtatctttttttcttaagcaaaccctgaaaggatgacaatcatgacaaaacgcttaatactcgcatcacaatctccgcgaagaaaagaactccttactcttcttcagattccttacagcattattgcaagccgcacagaagaaaaattaaatcgaaacctttcgccggaagaaaacgtccaatgtttggccgagcaaaaagccggtgctgtattggccgaaaatcccgatgcagtcgttatcggggctgacacgatggtgtgcatagacggcgaatgcctcggcaaaccgcatgacagagaagaagcggcacacatgctgcggaggctttccggccgaagccatcaagtcattacggcggtcagcattcagacgcatgaccggaaagaaacgttctgtgacacgacggaagtgacgttttggccgctcagtgaagacgacatacagctctacattgaaacaaaagaaccgatggataaagcaggtgcatacggcatccaaggaaaaggcgcgcttttagtgaaaaaaatagacggtgatttttattctgtcgtcgggcttcctgtcgctaaaacaatgagagccttgaaagaatttaatataaaagcttgatgttcaaaccgggaaggggaacaaggaggggttgatcatccgtgatctgccgttaaaattaagagatttccccgaaaaagaaaaaccgagagagcggcttctgcacttcggagccgaacatctctctaacaatgaattgctcgccatcctgctgcggacgggaacgaaacatgagtccgtcatgaacctcgctcaccggctgctgcggacgtttgacgggctgcgactgttaaaaggcgcctctgcccaggagctttccagcattccgggaatcggcacggtgaaagccgttcagattcttgccgcaattgagctggggagccgcattcataagacatccgccggggagcattgcgtcatccgctctccggaagacggggcgaagtatgtgatggaggatatgcgctttttatcccaggagcattttgtctgtttatatttaaataccaaaaatcaagtcattcataaacgcaccgtttttatcggaagtctgaattcatctattgtccacccgcgggaggtgtttaaagaagctttcaaacgatccgccgcgtccttcatttgcgttcacaatcatccttcaggagatcctacaccgagcagggaagatatagaggtaacccggcggctttttgagtgcggaaatttaatcggcatcgagctgctggatcatttggtcattggtgacaaaaaatttgtgagtttaaaggaaaaaggatatttgtaacactttttttttcgttgatttaagatataatagattttatgagtttttccctttagggtatttttgctttaagaaaggaagatacatacatatgttcggaattggtacaagagaccttggtatagatttgggaaccgcgaatacgcttgtgtttgttaaaggaaaaggaatcgtagtgagagagccgtctgtcgttgctctgcaaacggatacgaagtccatcgttgcggtcggtaacgatgcgaaaaacatgatcggaagaactccgggcaacgtggttgcgctccgtccgatgaaagacggcgttatcgctgactatgaaacaactgcgacaatgatgaaatactacattaatcaggctgtgaaaaataaaggattgtttgcgagaaagccttacgttatggtgtgtgtgccgtcaggtattacggccgttgaagaacgggcggtcatcgacgcgacaagacaagcgggcgcacgtgacgcttatccgattgaagaaccgtttgcagcagcaatcggcgcgaatcttccggtatgggagccgacgggcagcatggtcgttgatatcggcggcggaacaactgaagtggcgatcatttctttaggcggcattgtcacgtctcagtcaatccgcgtagccggtgacgaaatggacgactcaatcatcagctatatcagaaaaacatataatctgatgatcggtgaccgtacggcggaagccattaaaatggaaatcggttcagcagaaaccggtgaagaaaatgcgtcaatggaaatccgcggccgcgatcttctgacaggtctgccgaaaacgatcgaaattacgggaacggaaattgcaaatgcactgcgtgatacagttctctcaatcgttgacgcggtgaagagcacgcttgaaaaaacaccgcctgagctggccgctgatattatggacagaggtattgtattaacagggggaggcgccctgctccgcaatctcgacaaagtcatcagcgacgaaacgaaaatgcctgttcttatcgctgaagatccgctggattgtgttgcgatcggcactggaaaagcactggagcacatccatcttttcaaaggaaaaacaagataatcaggagttaaatagaagaggtgtatcacgatgccgaacaaacggttaatgctattacttctgtgtattatcatattggtggctatgattggattctcgctgaagaacggccgtaataccacctggcctgaaaagctgatcggtgatacgacgggagtatttcaaaacatttttcacacgcctgccgaatattttgcagggttcttcggggacataaaagacctgaaaaacacgtacaaagaaaacgaacgcttaagacaaaagctggacggacagacacaatatgaagcgaagctccaagaactcaaagatgaaaacaagaagctgcgtgatgaactcgggcatgtcaaatcaatttccgactatgatccgattttagcgaccgttatcgccagaaaccctgatcaatggtacaagcagatcatgatcaataagggaacgaagcagaaagtggccaaagacatggctgtcacgaacgaaaagggtgcgctggtcgggaagatcaaaagcagcggactcaacagtttcacatccgccgttcagctgctgagcgatgttgaccgcaataacagagtggccaccaaaatctccggcaaaaagggaagcaaaggctacggtttaattgaagggtatgataaaaagaaacagactctgaaaatgaccatccttgagccggatgaaaaacgtgaagtgaaaaaaggcgacctcgtggagacatccggaacgggcggcgtatttcctcaagggctgacggtcggggaagtgaccgatgtagaatcagatgcttacggcctgacgaaaatcgcttacgtgaaaccggctgccgacttgtacgatcttgaccatgtcatcgtcgtgaaccgaagcgtagcaacaggggaggaaggatcgtgaaacgtttccttctccctttgattatgattttggtcttttgtgcggaaagcatctataccgatctggtgcgttttcctttcgtttccgtcgagcagcaggtcgttccgcattttcttttgcttgcgctgatttttatgtccgcttatatcaaccaaaagcatgcggtgatctacggtttgattttcggatttctttatgacatcaattatacgggtgttttaggcgtttatatgtttggttttgccggtttatgctatctggcggccaaagcgtttaaagtgctgcagacaaacgccctgatggtcattctggtcgcggtgctgagcgtatgtgtgcttgaattttacgtctacggcattcagacgttaatccgcagcggcacaatgacatttaacgattttgtcattcagaggttcttgccgaccgctttgctgaatattgcgggagccgttatattagtcctgcccttcaggctgttttatataagtctgaagaaagaattaagagatgagtaaaaaggattttatctttttttgacgaaaagagtatgttgttgaggtgaacattgatgaagaccaaaaagcagcaatatgtaacaataaaaggaacaaaaaacggcttaacattgcatctggatgatgcgtgttcttttgatgagcttctcgatggtcttcaaaacatgctgtcgattgaacaatatactgatggcaaaggccaaaaaatcagtgttcatattaaactcgggcatcggtatctgtatcaggaacaggcagagcagctgactgatctgatcgcgtcaaagaaagatttagtcgtgcattcaattgacagtgaagtcatcgccaaagaagaagcgcagcggatgaaagaggagcaggaaattgtttctgtttccaaaatcgtccgttcgggccaggtgcttcacgtgacgggagatttgcttttaatcggagatgtgaatcccggcggtacgatcagagccggaggaaatatatttgttctcggttcattaaaagggattgcccacgcgggttataacggaaataaccgggctgtgatcgccgcatcagaaatgatgccgacacaattgaggatcaatcacgtgttaaatcgctccccagaccacattcaaaaagggaacgacatggaatgtgcttatttagatactgacggaaatatggtcattgaacgccttcagcaattggctcatttaagacctgatctaacaaggcttgagggaggaatgtgaaattgggtgaggctatcgtaataacttcgggaaaaggcggagtaggtaaaacaacaacatctgcaaacctcggtaccgccttagccattttagggaagcgcgtctgtttggtggacacagatatcggactgcgcaaccttgatgtcgtaatgggtcttgaaaacagaattatttacgacttagtagatgtaattgaaggcagatgcaagacgcatcaggcgcttgtcaaagacaaacgttttgatgatctgcttcatttaatgccggctgcccagacaagcgacaagacggctgttgtccctgagcagatcaaatcgcttgtgcaggagcttaagcaggaatttgattatgtcattattgattgtccggccggaattgaacaaggctataaaaatgccgtctccggagctgataaggcgattgttgtgacgacgccggaaatatcagcggtgcgggacgctgaccgcattatcggacttttggagcaggaagatatcgaaccgccgcgccttatcgtgaaccgcatcagaaatcatctggtgaaaaacggtgacacgatggatgtggatgaagttgttcatcatctgtctattgatctcctcggaatcgttgctgacgatgatgaagtgatcagggcttcaaatatcggcgaaccgattgccatgaattccaaaaaccgcgccagcattgcgtaccgcaatatcgcccggcgcattttaggagaatccgttcctttgcaggtgcttgaagagcagcaaaaagggatgatggcgaaaatcaagtcatttttcggcgtgcgttcataatatataccagaatacaaagatctgatgaagcccagcttatcaggtcttttttgtttttcaagagcgcatatttgcaatggacaagacataggatgtacaaacccaacgattgcaaaggatgatggcgatgagtcacagagctgatgaaattagaaaaagactggccaaaagaagaaaacagcggcctgaatcaaaacggactttcgttcaaaacgcccaaacgcagaattttcccgcgtggcagacggtcaaggagcaggaaaagcacaagcttctaccggactacgaatatcaaacggaacacccgcccgaatttaacggacggcatccattgatcagtgctcattctattattttaaaatgcctgctggccgcctgtctcgtactgatctccgctattgcctataaaactgacaaacagtcgctgagtcagatcaaaccggcgatcgcacaaacctttcaaaaagaatttcagtttgctgccgtaagcaattggttcgtatcttccttcggaaacccgctcgcttttcttacgccgggaacgaaaaagaaggacggtcaggtggcggtcagtcaggatatggccgttcctgccgcggggaaaatccagcaggactttcaaaataacggagaaggcgtcgtcgtcgaaaccgccagcgaagccattgacagcgtaaaagaaggctacattatggaagtgagcaaagataaaaaaacaggactgacggtgaaggtgcagcacgccgacaataccagcagcatttacggccggctaaaagatgttaatgtttcattgtacgactttgtcgataaagggaaaaagatcggttcgatcaagctcaacgataaaagtaaaggccagtactatttcgcgatccaggatggcgataaattcatagatccgatccaggtgatcacatttgatgaataaatggctcatcctcctttttaaaattcatgtccatccttttctttggattatcatggggcttggtcttatgacggggcacatcaaagcgctgctgtgtcttttgctggtcgtatccgttcatgagctggggcatgctgctctggctgtgtttttttcgtggcgcattaaacgcatctttctgctccctttcggcgggacggttgaggtggaggagcacggaaaccggccgcttaaagaggaattcgcggtcattctggcgggcccgcttcagcatgtgtggcttcaggcggcagcctggctctttttcatgtcaggctttgcaagtgagcagacatttgagatgtttaccttttataatctctccattcttttcatcaatcttttgccgatctggccgcttgacggcggaaagttcgtgtttttatacttctctaaacaaatggcttttcaaaaagcgcatctcctcagcctgcagacatcggctgtttccgcgcttttgctctgctgctggattgtgctggccgtcccccttcagatcagcgcatgggtgctgttcgtctttctcgccgcttctttatgggatgaataccggaagcggcattatattcagctgaggtttcttttggagagatactacggcaaaaaccgcgatgtcgccatgctgcatcctttgacggtcgcggccgatgccaaagtaaagcatgtcatggccgaattcaaacggggatgcaagcaccccattatcgttgaaaaagccggcgaaaagctcagccagctcgatgaaaatgaagtgcttcatgcgtattttgccgataaacggacagattcctctatggaagacctgctgctgccttactagaaatagattgacatatccttttggttctgatatattttttaatgttatggatgtagcaccaatgctacaaccgctcgggacaggtgataagagctttaaagccccctgttgctggcgagtcttagtctaataggaggtgcagagaatgtacgcaatcattaaaacaggcggaaaacaaatcaaagttgaagaaggtcaaactgtttacatcgaaaaacttgctgctgaagcaggtgaaacagtgacgtttgaagacgtattgtttgttggcggagacagcgtgaaagtcggcaacccaacagttgcaggcgcgacagttacagctaaagttgaaaaacaaggccgtgcgaaaaaaatcactgttttccgttacaagccaaagaaaaatgttcataaaaaacaaggtcatcgtcagccttatactaaattgacaatcgaaaaaatcaacgcgtaagcatgattgaggcaacaattcgaagatcccggaatgacgggggcatattgtcctttgaaatgacgggacatgccgattttgctgaacatggacgagatctcgtatgcgccggggtcacggctgtcgttttcggagcggtcaatgcggttatcgcgctggctcctctcgaaccgattcttgatataggcgaggacgggggttatttctactttgaattccctgaagccgctgatcaggaagctttgcaaaaagcgcagctgctgattgaaggcatgattgtttctcttgaaacgatcgagcgggattacagtgaacacttacggttgactgcaaaccaaatataggaggtgagttacatgcttagattagatcttcagtttttcgcttctaaaaaaggtgtaggttctacaaagaacggacgtgactctgaatctaaacgtttaggcgctaaacgtgcagacggtcaattcgtaacaggcggatctatcctttaccgtcaacgcggaacgaaaatctacccaggtgaaaacgtgggccgcggaggagatgacactctttttgctaaaatcgacggaactgttaaattcgaacgtttcggccgtgaccgcaaaaaagtgagcgtatatcctgtagctcaataatgacacaaaaaactccggtcgttgactggagttttttttgcagtaagcggagtaacatcaagaatgaaaagcagaggatgcgtgagtgaaccccgccttgaatgaggacatcagcttcccatacccactggatatgttccccaagcagtgataccaaaaatgtttctgcctggcatccgcattgtatgcgatccgaaaaaggaacatgatgaaccaggaaaaacaagtgtttttttaacaaagccttctctgttataattcatagtacacacttatcaagactcctaaaaagaaattaaacgattgggagtgcgaaaatgaaggatgtatcgaagaaacaagaagaacctgtaagcgatgcggctctgatcaatgagctgatccaattaatgggccatttccgtcatgattggatgaataagctgcagctgataaaaggaaacttaagtttgcagaagtatgacagggtcgttgaaattattgacgaaatggtcatagatgcaaagcacgaatcaaagctctcaaacctgaaaaccccgcacttggcgtttgactttcttacatttaattggaagtcccgttatatgaggctcgaatacgaagtgctcggagaaattaaagatttatcggcatatgatcaaaagctgtcgaacctgatgagaaaactgtttcatctgttcggtctggcggtaaacaatgaaagtgaaaatcatctgaccgtatcgctgcagacggatcaccctgacagacagcttattgtatatctcgattttcatggaacgattgcaaatgcagatgtgtttgatgaatttcgcaaatcccggcatgaggactttgatgtcatgcaatttgagctgaccggccatgaatgtgtggccgaaattggaatgaactagcggttttttacggtttagaacggaggatattatgtttgtagatcaggtgaaagtatatgtaaaaggcggcgacggcggtaacggaatggttgcgttccgccgtgaaaaatatgtgccgaaaggcgggcctgccggcggtgacggaggtaatggaggcgacgtcgtttttgaggttgatgaaggactgcgcacgctcatggacttccggtaccagcggcatttcaaagcgatacgcggcgagcacggcatgtctaaaaaccagcacggcagaaatgcggacgatatggttgttaaagttccgcccggcacagtcgtaacggatgacgatacaaaacaggtcattgccgatctgactgagcacgggcagcgtgccgtcatcgcaaaaggcggacgcggcggacgcggaaatacccgctttgcgacaccggccaacccggcaccgcagctgtcagagcacggagagcccggaaaagagcgctatatcgtgcttgaactgaaagtgcttgcagacgtaggtctcgtcggcttcccgagcgtcggaaaatctacgcttctgtctgtcgtttcatcggcaaagccgaaaatcgccgattatcattttacaacgcttgttccgaatctgggcatggtggaaacggatgacggaagaagcttcgtcatggcggatctgcccggcctgattgaaggagcgcacgaaggagtcggcttaggccaccaatttctccgccatatcgaacggacgcgcgtcatcgttcacgtcattgacatgtcagcgatggaaggccgtgatccgtatgaggattatgtgaccattaatcaggagctcagtgaatataatctgcggctgacggagcgtccgcaaattatcgttgcgaataaaatggacatgcccgaagcggctgaaaatcttaaagcgtttaaagaaaagcttcaggatgaccatcctgtcttcccgatcagcgctgtgacgagagaagggctccgcgatcttctgtttgaagtcgccaaccagctggaaacaacgcctgaattcccgctgtatgatgaagaagaactggcggaaaaccgcgtaatgtacacgatggaagatgaagaaattccatttaacattacccgtgatccggacggcgcgtttgtgctttcaggtgacagcctggaacgcctctttaaaatgactgatttttcccgtgacgaatccgtcaagcgttttgcaagacagatgcgcggtatgggcgttgatgaagcgctcagagaacgcggtgctaaagacggcgatatcatccggcttctggaatttgaatttgaatttattgattaaaaaaacggagagcttgcaatgcaggctctctgatgtaaaagggaggggtgcaggtgaaagaagagacattttatttagtgcgtgaagacgttctgcctgatgcgatgcgaaaaacccttgaagtcaaaaagctgctcgacagaaaaaaggctgaatcggttgcagatgctgtgcagaaagttgatttaagcagaagcgctttttacaaataccgagatgcggttttccctttttacacgatggttaaagaacaaataatcacacttttctttcatttggaggatcggtcaggcgcgttatcccagctattgcaggcggtggctgactcaggaagcaacgtgctttccattcaccagacgattccgcttcagggcagggcgaatgtcacgctctcaatcagtacgtccgcaatggaagaaaacattcatacgttaatgaataaactgagaaaatttgattttatagaaaaagttgagatcttagggtcaggcgcgtaaggagagaagagacatgaaagtcggttatttagggccagaagccacatttacacatctagcagtcagttcctgctttcaaaacagcgtgacacaagcaccttatcaaacaataccggcatgcatggatgcggcggttgcgggagaagttgatcttgcatttgttcctttggaaaacgcgctggaaggctcggttaacttaacgattgactatttgattcatgagcagcctcttgcgatcgtgggggaaatgacgttgccgattcaccagcatctgctcgttcacccttcgagagaaaatgagtggaaaaaacttgagaaaatttattctcattcccatgcgattgcgcaatgccacaaatttcttcaccggcatttttcgtccgttccttatgagtatgcgaagtcaacaggtgcggctgctaagtatgtcagtgagcattcggaccttccgatcggcgtgattgcaaatgaaatggccgccgctacatacggattgagcatcgtgaagcgggatattcaggattatcaggacaaccacacgagatttgtcattctttcgcctgaaaaagacgtctcattcgaagtgaatgcgaaactgtcttcacggccgaaaacgacgatgatggtaacgcttccccaagatgaccaatcaggtgcgctgcacagggtgctgtccgctttttcatggagaaacctgaatttatcaaagatcgaatcgcggccgacaaaaacgggtctcggcaactatttctttattattgatattgaacaggcgatggatcaggttctcattcccggtgccgttcaagagatggaagccctcggctgccgggtcaagcttctgggaacatatcaatcctattcgagataaaaaaagcccttcagggggcttttttttaatcttttattaaaatacccgcgtcgtccagcgcttggcaggcttggtcaatccgctcttttgtcggggcgcttaacgtatggaggtgcacgcctccggtcagctgtgaaaggtaagcggcatttgtcgagttaatgtgatccatgaattgtttgacttctttccgtgtactgactcttatggcggcggttaaatcgccgtatacggggtgttcaattatgacgtcctttatggtgacgccttcatcgacaataagtgcaagctcttcttccgtccgctccgggccgtgcagacaggcgacaatccgttcggcatttttttcgccgccggcattcatgctgatgtataagtagccttggctcgtcgcgataatcggctcgttttttgctttcaaaagcgatatgtcctgcacgatcacctgtcttgagacatttgcttttttggccaattcgcctcctgttaatggcgagccggcttctttcagccaatgaagcagcatgtcgcgtcttttctccccagtaagcttcgttccttctgtcaaattgctgattctcctttcttttgctcccatagcgccgtaaatgtatgtatcagcatatcgagctgttcacatgttgtttcgtttccgaatgagatccggaaaaactgccgcgcttcccgttcggtttttctcagcgccttcatagctgaagaagggccgtggctgccggcggaacatgcgctcccggttgagatgcaaatatcgttacgattacattctaacataatatattgtccttcaaaggagtgaaaaaaacacccgacaatgtggggcaggcattcaccgccggtttcttcctctgaaaatgaaatggggaggccttgacgccgaatttggtcatacaaataattcctcagcctgtcagcatgctcacggtgttcctccatatgtttcactgcatactccgcagcagcggtaaaagcgccgatggccggcacattcaccgtaccgggcctgaacccgttttcatgcacggtatgcggataaaccgggttccagctgacaccgggccgaatgtaaacagccccggtgcctttcgggccgtatactttatgaccggagacggaaagggcgtcgattcccgcctgatccgcatcaatcggcagtttgccgaaactttgaacacaatcgcaatgcagcaaaatgtttctctggtgaagaaaagcggccagacgattcacaggctggatgaggccggtttctgaattggcgtgctgtatggaaacgagccccgtgtcaggacggatatgagccgccagtatgtcctcggttataaggccgttttcgtcaggatatatgatggtgacatcaattccacggtcagctaaaaacgcagcggcattatggatcgaatggtgttccattgcggtcgtaataaaatgttttttgtgatcgggcaggccgtgcagcaatgattggacggccaggatgttcgcttccgttccgccgcttgtaaagtaaatgccgtctgccgctccgccgatcaatttgcctgcagaatgtctgcaatattccagcacgtccgccgctcttcctccggcgtcatgaaggctgcttgcattgccgtatacctctgtgctgagatgctgaaagactttcgcggcttctttgcttaaaggcgctcccgccgcgtaatcaagataaatcatacagcccgtctcctatccgtttatgttaaaaaaagcttgagtttattttatcgttgtgtaaatataggtgtcaagacaggtgtaaataacaggagggtgatgtatgtctgaaaaaacaattatcgtcattggttcggggacggcggcccttgcctgtgcttcctcatttcctccgtcataccaagtgaccgtcatcacaaaaagaaacgtaacgaacagcaattcgcattatgctcaaggcgggattgctgtttcatacgcaaaagatgactcgatagaatcccatgtgaacgatacactgtatgcgggatgcggccacaatgacgtgacagccgtgcggcatttgctgaaaagcgggcagagcatgataaacaggctgatagaaggccatttcccttttgatacgaagtcggacgggacgttttgtctcggcagggaaggcgctcattccaaaaggagaattctgcacgccgggggagatgcgaccggacggatgttagttgagtttctggttcagcagctgagggacggcatacggatcattgaacacgagacggttgttgatctgctgattgaacacggacgatgcgcaggtgttgccgtaaaggatgcttcaggcgctgtttcttacagaagagcggattgtgtagtgcttgcatcaggcggctgcggcagtctgtaccaatatcacacaaatgattccgccataacgggagacggcatcgctcttgccttccgcgcgggagctgagatcacggatatggagttcacccagttccacccgaccctccttgtgaaaaacgggactgtgtacggcctgatttctgaagcagtgagaggagaaggcggatatttagcggatcgcttcgggcgcaggatcatggctggcagacacgcgcttgaagatttggcgccccgggatgtggtttcacgggcgatttatgaagaaatgatgaaagagaatcctgtttttataaattgcagccgaatagccgattttaacaaacgttttccgaccataacaggtatttgtcaaacagccggtgttgatcttgaaagcgggattcccgtagcacccggaatgcattttttaatgggcggagtaaaagccgatacatgggggaaaacgtccgtgcctgatttgtacgccataggcgagacctcctgcacaggattgcacggggcgaaccgccttgcgagcaactcactgctggaagcgctggcaagcgggaaacgatgtgctgaacatatcattcaaacaccgttaaacggaagatataaaaaaaccccgaagaaatctgacgtcatcttacaagtgccggacacaacgcttcatgtgctccaagccaaaatgacaaccggagcgggcatcgtcagggaaaaagaaaacatgcaggcgctggcatcctggcttaacaacgtatctgtgcgtcatataaatgtgaaggatatcacaatagaacaagccgagctatcctgcctatggaagactgcgcaacttgttgtgacctctgcccgtattcgggaagaaagcaggggggctcattttcgcgctgattttcccgggacggagaaagagtggcacggaaaacaaatcattcattcaacatctggaacagttatcagaaaaaacgaaaggattggggaactatggacattctgcagctgaaacaaatgctgactcatttttttcaggaagatatcggaacgggtgatgcgacgtcacaagcgattttttcttatcagcaatgtaaagcgcgaatcatcgcaaaaacagacggcgtgtttgccggagaagccgttatccgtgaaggatggaagcttttacacgatgatatccgcatccgctccctgaaaaaagacggagaacggatgaaaaaaggagacgtgctcgctgaaatagaaggccaggcggcggctcttcttacgggggagcgggtcattctgaatctcatacaaagaatgtcaggcattgcgacaatgacggatgaggccaaaaggcgtcttgatgatccgtccatcaagctttgtgatacgagaaaaacgacacccgggctcagaatgctggaaaaatacgccgttcgggtcggaggcggctttaatcatcgcttcggcttatatgacggcatcatgataaaagataatcatattgccgcctgcggatcgataagggcggccatggagcgggcaagaaaaacggcggggcagatgcttgcggtggaagtcgaaatcgaatccgaacagcagctgctcgaggcaatagaagcgggtgcagacgttattatgtttgacaactgtccgcctgagtccgtccggcgttttgcaggtatgacaccgggccatatcaaaacggaagcatccggaggcataacgctcgacacgttgcccgcttataaaggaacgggggtccaatatatttcactcggatttctgactcattcagtaaaaagcgccgacatcagcatggatgttgaggctgcggaacagggggatttttaagatgtctatttttgacgtgctaactgcatcagccgaaatgatgccgagccattataaagacatgggcaccggagaaatggaaaagcgggtcgccgccattaaacgggttttcggaaagcgtctgttcattccggggcatcactatcaaaaagacgaagtaatacaattcgccgatacggcaggtgactctctgcagcttgctcaagtggcagaaaaaaataaagaggcggaatatattgtgttttgcggcgtgcattttatggcagaaaccgctgatatgctgactgatgataaccaaaccgtcattttgcccgacatgcgcgccggatgctcgatggctgatatggcagatattcagcagacggacaaagcatggcaagagcttcaagaactgtacggtaacaccatcattccgttaacatatgttaactcgacggcggaaattaaagcattcgtcggacggcacggaggagcgaccgtcacctcttcgaatgcccggagtgtgctgaaatgggcttttaaacaaaaagagagaattttatttttgccggatcagcatttaggcagaaatacggcctatgacctcggcattccgctgacagaaatggctgtatgggacccggtgcagaaccgattgcttactgaccatccggaaaacattaaggttatcctttggaaagggcattgctccgtacacgaaaagtttacagcggaaaatatttctcagctgcggcagcgggattccggcatccgcattatcgttcatccggaatgttcgcgggaagtggtctcgctcagtgacgacagcgggtctaccaaatacattattgatacgatcgaacaggctgaaccgggaagcaagtgggcgatcggcacggaaatgaatcttgtccagcgcctcattcactcgcatccggataaacagattgaatcattgaatcccgatatgtgtccgtgtctgacaatgaacagaatcgacctgccgcatttattgtggtcgcttgagcagcttgaaaaaggcgagccgaaaggtgtcattaaagttccggaagcggttcggacagaagcgcttcgtgctttgaacagaatgctgagtcatacgtaatcataaaaatttcccctccttcccaaattttttatcatcatgcccagtccatcggcatatagtgtgaagaaacgtattgtaatgacaaatgtaccgttcacgttttgtgcataggaggggaaaacgttgaaaattcatatcgttcaaaaaggcgattcgctctggaaaatagctgaaaaatacggagttgatcttgaagagttaaaaaaactgaatcatcagcttagcaatccagacttaattatgcctggaatgaagataaaggtgccttcagaagccgttccggtcagaaaagaacctaaggccggcttcggaacgtctgcgcataagcatgagcatccatatgccaaagaaaaaccgaaatcagttgtggacattgaagacaccataccggaagaaccaaagccgtcaattccgtatgtgccgccaatccctgaaaagcatgaaaatgtgctgccggaagctgatatgaaccaatattacccgtccaatcagctgtttcagccgtggtcgcctcctaagccggaggaaccggtgacacattttgtcgagccgaaagaaaaagagcatgacaataacattccacaacaggaggaaatgatcaacatggaaaacgtgaattacccgaatatgccaaaggcgcctgaagccggaaagatggaagaagaaaacgccgcttatcatctgccgaacatgccaaacattccgaatgtcccgtttccgaatatgccggccgttgaaccgtcttttatgcattacccgatgccgtgcatgccttgtccttgtccggttccggtgacaccgatgctcccgggttcgggactatgccatccgtgcttcccggtaggcggaggtttcggcggttttggaggaggttttggaggctttccggtaatgccgatgccgttaccgtacggattccatcatccgggatttgggccgcaagcgggttacggtgaatatgaaaaccaggcccatgaaaatgcagagcattatgatggttctgcatctggtttcggcggtgctccgtacggtcaaatgccgtattacggcggatattcgtcacattacgcaaacgcgcctcatcatgatggaaaatataaggatgatgattgcggctgccatgattcacatcatcaccaccaccatcaccacggttcacatcaccatcacgcaaatatgcctgtgcagccgtatccgaatatgggtgcaaacgcgggatattttatgccttacggcggagcaaatcctaatgccgcgccgaatcagccgagtccaaatcaagtattcggacggccggaggaagaagaagattaatgtttcgggacgatgtatgtcgttcctttttttatgtccaactgaggaatggacataactgacaagcttaaacccgccgcccgccgcgcatcctaaacatgagcggaaaacgctcaaaacagcgatgaatccacggggggtttttccattgggtaaaaaactgatgacggtcgcgggcgttttagccgtgacggcaagcttaacggcatgcggagcaaataatgccatgaatgacggacgctacaaccagtcaacacgtccggttggatattattcgaatgataatggtaacggcagaggccagtacggaatggaccatcaaggacccgtttctgaaatgatggaaaaccgaaacggccgtcataatacgacaaacgtgtccgaccagtacgcgcctaatgacggggttccgttaacgacggacggcacatataatagccgaaatgccaatacgccgccggcagcaatgtcttataatgggtatgacaacgccgaaaacatcaggttggcggcaaaagttgcaaaccgcgtgaaaaaagtaaacggcgtacaggatagtcaggtcatcgtgactgacacgagagtcgtcattgccgtcagaacaaatcatccttttacgaaaaatgatgataaacatgtcaaacatgcggccaaaaaattcgcggacggccgtacaattcaagtgtttaccgacaacgctacttttacaaagctgcaagacatgaacagaaacagccgttaaacgggactgccggatgatttcatccggcagtatttttatggataaagcttcatcatttctttacatattcttaaaacgctctttatattgcggtgttaacataaaagtaataaaacgtaacggaggggccgggatgaaaaaaacggagcatgacaaaagccgcggagcaaaaactgtgtatctgaccgtaaggggataccggctcaaactgacgcccggacaaatgaaactgatttcagccggacgggcataatcatcgcagcagccctcatttagagagctgctttttttcggctgaaacagacaaatgaaagaaaacggttaagcaccggcatctttggtcaaactagcatcaagagtttgattgaataaagaggtgttattggtgaaacgaatttgcggtgctcgtctattgtttatgcttatcttatcggctgcagccctgatttgcggaggaaaaggcgcatacggggcggaggtcgagcattacgggccgcttcgggtgcacgtccagctggaaaaggtctatctggacggtgatgtcggcatcgaacatacggatgaaaccgttttggcgatggaggatttttgggccgcatatgcgggctggacgctcgttgagcagaaaaaaggcttcgtccttttccgtaagcatgttgatgacatttctccgctcagtaaggttaacggttatatcggcgtcacggacgggggcgtcatctccacttttcacggccgtcccggatcgctggccgagccgattcaatctttcttccagattgatatagaaagactggaaagccgattgcaaaagcacttggaacacggcataccgtacaggacaaaagcggagtttgagagcgtgatcgatcatattaagacttacagcggctgactttgacgcaagacatgtgacacatgtcttttttttctgaatggaaggtgtcaaagcgaacatacgttaacttttctataagactttggctgtttttgtgttacaatgataagcagtcaaagaggtgaataggtgtgattgaattcgtgaaggggacgattgattatgtatctccccaatacatcgtgattgaaaacggcggaatcggctatcaggtcttcactccgaatccgtttatttataaggtaagcaatcaagagaccatttttacgtatcatcatataaaagaagatgccttttctttgtacggtttttcaacccgggaagaaaaagcgcttttcacaaagctgctgaacgtcaccggcatcgggccgaaaggggcgctcgccatcctcggctccggtgatcccggagccgtcatcgaagcgatcgaacaggaagatgaagcctttttggtgaaatttccgggtgtgggcaaaaaaacggcgcggcagattattcttgatttgaaaggcaaactggccgacgtcgtgcctgaaatgattgacaacctgttcaatcatgaagcgcgcattgaaaaacaagaggctgaaacggcgcttgacgaggcgcttgaagcgctccgggttctcggctacgccgaaaaagaaattaaaaaagtgcttcctcacttaaaagaggaaacggcgctttcaacagatcaatatgtgaaaaaagcattgcaaaaattattaaagtaaggtgatgttcatggatgaacggctcgtttcaagtgaagcagacagccatgaatcaataatcgagcaaagcctcaggccgcagaatctcgcccagtatatcggccaaaagaaggtgaaagaaaatctgcgcgtgtttatcgatgcggcgaaaatgaggcaggaaacgctggaccacgttcttttatacgggcctccgggtctcgggaaaacaacgcttgcgtctatcgtggccaatgagatgggtgtggagatgcggacgacgtcaggtcccgccatcgaaagaccgggggatttggcagccattttgacggcgctcgaaccaggggatgtgctgtttatagacgaaattcacaggctgaaccgctcaattgaggaagtgctgtacccggcgatggaggatttctgccttgatattgtcattggaaaaggcccgtccgcccgctccgtccgtctcgaccttcccccttttacgcttgtaggagcgacgacaagggtcgggttattgaccgcaccgctcagagaccggttcggggtgctgtcgcgccttgaatactatacgcaggaagagctgacagatatcgtgtcaagaacggctgacgtttttgaagtggatatcgaaaaagccccggctctggaaatcgccagacggtcaaggggaacgccgcgggttgcaaaccgtctgctcagaagggtgagagattttgcccaggtgctcggcgacagccgcatcacggaagaaatcgctcacgacgcgctcgaacgtcttcaagtcgatgcgctcggccttgaccatatcgaccataagctgctgatgggcatgatcgaaaaattcagcggcggtcccgtcggccttgatacgatttccgcgacaatcggcgaagaaccgcatacaatagaggatgtgtacgaaccgtatctgctgcagatcggatttcttcagaggacgccgaggggacgggtcgtgacgccggctgtgtatgaacattttcgattggaggcgcccgcccgtgactgactttccgaaggttctcatggttctcggtgccgttttgcttattgccggcgcagtctggcactttgtcggaaggctgcccggagatattttcgttaagaagggaaatgttacatttttcttccccgttgtcacttgtattgtgatcagtgtgatactatccattctgcttaattttttcggcagaatgaaataacaatagacagaattaaggtgaaatgatgaaagtcgatttatttgattttgaactgcctgaacgcctcattgcccaagtgccgcttaaagagcgtgacgcatcgcggctgatggtgctcgacaaacagacgggcgggctgacggacagttcatttaaagagattgtaagcttttttaatgaaggggattgcctcgtcttgaacaatacccgtgtgctgcctgcaagattattcggcacaaaagaagatacgggagcgaaagtggagcttctgttattaaaacaggaagaaaatgatacatgggaaacgctcgtaaagccggcgaaacgcgtaaaaaaaggaacggtcctgacatttggcgacggccggctgacagcggtctgcacggaggagcttgatcacggaggcagaaaaatagaattccggtatgacgggattttttacgaagtgcttgaatcactcggtgaaatgccgctgcctccttatattaaagagcagcttgatgataaagaacggtatcagaccgtcttttcaaaagaaatcggatctgccgcagctccgacggccggacttcattttacggaagagattctggacgagctgaagcaaaaaggtgtgcggattgaatttatcacacttcatgtgggactcggcacattccgcccggtcagtgcggatgatgtggaagagcataacatgcacgcggaattttatgaaatgacggaagaaaccgccgcctctttaaacgaggtcagaaaggcgggagggcgcattgtgtcggtcgggacgacatccacgcgcaccctggaaaccattgccggcgagcatgacggcgaatttaccgcttcaagcggctggacgtccatcttcatttatccgggatatgaatttaaggcgattgacgggatgatcaccaattttcatctgccgaaatcttcccttattatgctcgtttctgcgcttgccggcagagagcatgttctttccgcctaccgtcatgcggtagaagaggaatatcgtttcttcagctttggcgacgccatgctgattatctaatttgaatgacaggaggcctcatacaaagtggctgaacaaccgatacgttatgaatttataaaggaatgcaaacaaacgggagcgcgcctgggcagagtccatacgccccacggctcctttgagacgcctgtatttatgccggtcggcacgcttgctacggtaaagacgatgtctccggacgagctgaaatctatggatgcgggcattattttaagcaatacgtaccatttatggctccgcccgggacacgacattgtaaaagaagcgggcgggcttcataagtttatgaactgggaccgcgcgattttaacggattccggcggttttcaggtcttttcattgagcaagtttcgtaatatagaagaagaaggcgttcatttccgcaatcacttaaacggagacaagctgtttttatctccggaaaaagcgatggaaattcaaaacgccctcggctctgatatcatgatggcgtttgatgagtgtccgccgtatccggcagagtatgattacatgaaacgctctgtggaacggaccagccgctgggcggaacgctgcctggaggcgcacgggcgctcagatgagcaggggctattcggaatcgtacagggcggagaatacgaagacctgcggacacaaagtgcaaaagacttggtttcgcttgattttccggggtatgccataggcggattatctgtcggcgagccgaagcacgtcatgaaccgagtgcttgagtttacaactccgcttttaccgaaggacaagccgagatatttaatgggtgtgggttcaccggatgccttaattgacggcgccattcgcggcgtggatatgtttgactgcgtactgccgacccggattgcccgaaacggcacggtgtttacgaatgaagggcgtctgaatatgaaaaacgccaaatatgagcgtgatttccgtccgattgatgaagagtgcagctgccatacatgcaaaaattactcccgcgcttacatcagacatttgatccgctgtaatgaaacgtttggaattcgattaacaacttaccataaccttcattttctgttacacttaatggagcaggtcagacaagccatccgggaggatcgtcttggtgatttccgagaagagttctttgagcgttacggctataataagccaaatgcgaaaagcttctaaataaaaccattcatgaaaggagggaaacagttgggtactttaggtacaatcgttcctattattttaatgtttgcagtgctttatttcctgctcatccgtccgcagcaaaagcagcagaaggccgtacgccagatgcaggaagagctgaaaaaaggggatacagtggtgacaatcggaggattgcacggcactgttgattcaattgatgaaagcaaggtcgtcattaaaacaggtgataacacccgtttaacatttgaccgccgcgcaatcagagaagcttccgctgaataacagcgaagctcatacatacaaaaaaagagcggagaatccgctctttttttattacgctgatctgcttcctttcaaattcactccgaaaatgccgcccagcatactgactcccaaaaagccgagatgaaacaaaagctgaccggatgtaaacgtttttccgaaccctaaatattgaaacagcaagatgattaatgaaaaacagatggcggttaacgctccgatcatccagcctttttccttcgctttgccgcccgatataaaaccgcccgcaaataaagaaagaaaggaaagcgcggtgatcagccagctgaaagatgactcttccattgaggtaaccgtcagtaaaagcgaaatcgccaaactcgtaagaagcatcaccgcaaagatagccactaagccgtacaagacgcctcttcccacttgtttcgtttcttccatttttatctcctctccgccctgcggcctgatatatgacaagccggagcctgtctttttctaaatgtattctctgaatgttcgaattagacgtaaatgcatgatgttcagcccgtttcttacataattcagagccgatggcaaatgctatgaccgttggaggtgcgatatggaagatattttcattattacgtttcgtacgattgtgctttattttatcattcttgtgattttcagactgatgggaaaacgggaaatcggagaactgagcattttagaccttgtcgtctccattatgattgccgagattgccgtattggcaattgaaaatgtaaaagataagcttttgcatacgattgtgccgattgtcgttttaatgattattcaagtaagccttgcttttatttcgctcaaaagccaaaaaatacggcagctgcttgacggaaaacccaccattattataaaacagggaaaaattgatgaacgggcgatgagatcgcagcgctacaattttgacgatcttcttatgcagctgagggagaataacatcgatagaatctctgacgtgtcatatgccattttggagtcttcaggcaaactgtcgatcgtcaaaaagaaaaacaataaggataagcagatggaaacatcgcttatcgttgacggggtcattcagaacgagcatctggacagaatcgggaaagataaacactggctcgaaaaaaatttagcaaaaagaggatatcgcgatctttcggttatatcattctgcacgtttacggacggcgctttttttattgatcttaaagatgaaaaaggggagccatgaatcggtttcaccgcgtcacgaacttgccgatgaccggaatccggatcagctcttcccttttaatcagcctgaataacagaagaagcgctatatacaaaatcgcggtcattgcaatccagcctgtgagattaacagcctctgaccctgaaaaatgaacggcgtgtttgatgatgcggctgacatagccgcaaatgaatatgacggcaaaacagagcgcgtattcttttattttaatgctgatcggaagcaccttgcttacggtggccgcatgcagcagggtgacaagaaccatccccgttacaatcgcaagtgcggcgcccatgatgcccaaggaaggcctggtcgccaaaacaaaaattagaccagttttgacagcggcgccgataaaactgttcatcatggcggccccggctaaattgagagcctgcagcaccgcctgaaggggcccctgaaaatagtaaagcagaaaaaacggcgccatcactttaacaaataccgccgcattagttgatccgtacatgacggacatcagttcatcagcgaaagagaataaaataaccaccgaaatgcctccgcttaaaagacacagccgcatcgcctgttccagacggtattcgacaacttgcagctttttttgctccattccttcactgatcgcaggaacaagtgccgttgacagagaataggttataaagctgggcagcgtcaaaaccgtcatggcaaatccggtcagctccccgtactggctggtggcggcagcggtggccactcctgcaatcgcaaggctttgcgcgacgacaataggttcaaaaaaccaagataaatttccgatgaagcggcttccggttgttgggagcgacacgctcatcagctggcggaaggtttcttttccatttgcgatcgacttgaaaaattgttttctgattctgattgttttatttgctttaaaacaaatgaataaataaataagagaggcaagctccccgatgacagacgaaatcatggctccggctgcggcatattcaatcccgtacggcagaaacaccgtcgtgcagactgcgacaagtgaaatccgcacgatctgctcaagcacttgggaaaacgccagcgggttcatattctgccttccctgaaagtaaccgcgcagcacgctggagatcgcgataatcggcacgacgggcgtaatcgccagaagcgggtaaaccgtgcgctgatccgtcagcatcgtttcggacataatcggcgcaaagcataaaaacagcggcgtgaagatgagacttaatatcccggtgacggtaagcgacatcactaaaatgtgtttcattttctgccggtcccctcgcgcgctcgcttcagcgacaagtttgctgatggcaacggggaggccgaattgagtcaaagtggtggccaagaaaaatgtcggggcagccatcatgtataaaccgaccccttcttcaccgataaaccgggcgataaccacccggttgacaaagccgagcattctcgtaatcatcccggctgcgatgagaataagagtgccccttaaaaaagtctgttttgccattttataaacccctgccttctcaaactacctggaatcatatacaataaagatatgcgccgatgtcgtccgagcatgacaagtcttcgagaaaaatggaaaaaggagcgagcgcccagtggagaaacatcccgccgaaatgtacaaagatcatttgcggcctttcttgtacagtaaacttgaagagttcaaaatcctcggatacgatgatgttgagcacgagagtttatggtcatacttaatacataaaaagtggaaacagaaaaaggaactgccgctgcatgaattggccggtcatattttatcagttaaaattggcgattttatgaactatgcaaccgttgaagcttttaagtcgtctaattggctggaaagcgatgagggtcaggaagctttagatgaactgctgagataatgatttgacggcataggtttaaggaggaaatacataatgaaaaaaggacgcttgattgcgtttttcctgatcgtattattaatcggcacagggctggggtattttacaaaaccggctgccaataatattacgttaggattggatttacgcggcgggtttgaagttctgtacgatgtgcagcccgtcaaaaaaggcgataaaatcacaaaagacgtgctcgtcagcacggtgcaggcgctgaaccgccgggctaacgttctcggcgtaagcgagccgaacattcagattgaaggaaataaccgcatccgcgtacagctggcgggcgtcacgaatcagaacagggcgcgcgaaattctgtcaacggaagcgcagctctcgttcagggatacgaatgataaagagttgttaaacggctctgatctcgtggaaaacggcgcgaagcaaacctttgatccgacgacgaacgaaccgattgtcagcgttaagctgaaggatgcggataagttcggagaagtgacgaaaaaagtcaagaaaatggcgcctaataatcagcttgtgatctggcttgattaccaaaaaggcgattcatttaaaaaagaagtcggtaaaaaacatccgaaatatgtatccgctccgaatgtgagccaggaattaaacacgaaggatgtcacgattgaaggtcagttcaccgttcaaaaagcgaaggacttggccaatattttaaacgcgggcgcgctgcctgtgaaactgaccgaaaaatactctacttcagtaggggcgcaattcggacagcaggctttgcatgatacggtagaggccggcatcatcggtattgcaattgttttcttatttatgctgctttattacagactgccgggactcattgcggttattacgctttctgtatacgtgtatattacgcttcaagtgtttgactggatgcaggcggtgctgacgcttccgggtattgcggcgctcattttgggagtcgggatggcggttgacgccaacatcatcacctatgaacggataaaagaagaactgaaactcggcaaatccgtccgctcagctttccgttcagggaacagacggtcattcgcgacgattttcgatgcgaacattacaacgatcatcgcagcggtcgtgctctttattttcgggacaagctctgtaaaagggtttgcgacgatgctgattttgtcaattctgacaagctttattacagctgtcttcctttcaagattcctgctctcccttctcgtggaaagcagatggcttgaccggaaaaaaggctggttcggcgtcaagaaaaaacacattatggatattcagaagaccgacgaaaatactgaaccgcatacggcattccaaaaatgggatttcacgagcaagcgaaaatacttctttattttctcaagcgctgtaaccgttgcgggaattatcatcttactggtctttaaactcaacctgggaatcgattttgcaagcggcgcgcggattgacgtgcagagcaatcattctttgacggcgcatcaggttgaaaaagattttgattctctcggcatggagccggaaaacatcgtgctttctggtaaagagaaccatgttgccgcggcccggtttgtcggagagccatctaaagaaaaaatcgctgaaatcaaaacgtactttaaggacaaatacggatctgaaccgaacgtcagcacggtatcgccgacagtcggaaaagaactggcccgtaatgctttatatgctgtcgccattgcatcaatcggcatcattatttacgtatcaatacgtttcgagtacagaatggctatcgccgcaattgtatccctgctgtatgacgctttctttatcgtcgcgtttttcagcattacaaggctggaggtcgatgtcacctttatcgccgctattctcaccataatcggttactcgataaatgatacgatcgttacatttgaccggatacgtgagcagatgaaaaaacgcaagccgaagtcatttgccgatctggaacatatcgtgaatctgagcttgcagcaaacctttacacgttcgatcaatacggtcttgaccgttgtgattgttgtcgtcgtgctgctcattttgggctcatcgtcaattacaaacttctccgtcgccttattggtcggtttattgacgggcgtttattcctctctttacatcgccgcgcagctgtggcttgtatggaaaggtaaagaatttaaagggaaaaaatcaatcgaagagtaaaatgggaacaggctgtcttccggaaggcagcctgtttttttaggccgcattgaacttaaaacctgcatttgctataatgacatacgcttacataatcaatcatcattgtaaaaacatgtaggagggttcttatgaacgttcgtgagtcggagcttccgggcatcggccagaaagtagaagtcattacgaaaaatcacgataaaatcagtattattcttcatgatgacggcagaaaagagctctattacttcgatgagaatgatcatgacgaatgcttggcatccgttgaatttaacgacgaagaggcgaggcagatttccgctattttaggcgggatgacgtataagccgaaagcgctggaatctgtggaagtcgcgcttgatgacctcgtcattgagtggtttaaagccgaatctcatgcaccggctgtcagccgtacaatcggagatttggagatcaagaaacattacaacgtccagattattgcgatcgtaaagaaaaaccggcaaaaacagctgagccccggcattgataccgtaattgaagaaggggacaccctcgtcatgtcgggagaaagaagcggactgaaaaagctggtccgcgagcaattaacggcccggatttcctgagaccggggtttactcccggggaaatgggggaaaagataagaatgaacaattgggggcagacgcatgaataaacaatggactattatattcgctttactatttactttgattgtcgccatctttgctgtcattaacgtgcgggcggttgaggttgattatctgttcggaaccgctgaatggccgctgattttagtcattttaggctctgtgttaatgggagcgctgatcgtgttttcagccggtatctttcaagtgatgaagctgaagcgcgaaattaaaatcctgcggaaagaaaacagatctgcggctgaattgacggctgattcggacggcaaaaaaacagccgcgccgccggaagaaatgcttgaagagaaaaaaggatcagaataacatttgaaacccctcagtccgctctagtataatagggtggttgaggggtgaatttatgttagcgtcaaaaatgcgctgggaaatccagcagccggatcaggaaaaagtcaaatcactcacagaacaattggacataacacctcttgtggcatcactgcttgtaaaaagaggttttgatactgccgaaagcgcaaggctgtttttacatacaaaggatgcagacttttatgacccgtatgaattaaagggaatgcgggaagcagttgatcggataaaactggcggtttctcaaggggaaccgattatgatttacggagattacgatgcagacggcgttacaagcacgtcggtgatgctgacggcactgagacagctgtcggcggacgttgacttttatattcccgaccgtttcacagaaggctacggcccgaatgaacaagctttccgctccataaaagagcggggattttcgctgatcattacagtggatacgggaatcgccgccgtccatgaagctgaagtcgcaaaagagctgggcttagacgtcattattaccgaccaccatgagccgggacccgagcttcctgacgtatttgcgatcatccacccgaagcagccgggatgcggctatccgtttaaagaattggccggcgtcggtgtggcgtttaagcttgcccacgcgcttacgggttctttgccggaagctatgctggacttggcggcaatcggtacggttgcagatctggtgccccttcatgatgaaaacagattaattgcgtcactcggaatcgaaaggcttcggacgacaaatcggccgggcctcaaagccctgattaagctttccggcggagatatcggacaagctgatgaggaaacgatcggatttcaggtcgcgccgaggctcaatgcagtcggaagaatagaacaggccgatcccgccgtccatctgctgatgaccgaagatcagtttgaagcggaggaactggcttcggatattgaccggctgaataaagagcggcagaaaatggtgaaaaccatgaccgaagaggctgttgaaatggttcagcagcaaggcggaaacccgtctgccattgtagtggcaaaagccggctggaatccgggagtcgtcggtattgtcgcatcgaagctggctgaacgtttttaccggcccgctgttgtgcttgggatagatgaggagcagggaatcgctaaagggtcggcgcgaagcatcagaggcttcaacctgtttacgagcctttcacagtgcagagacatccttcctcatttcggcgggcatccgatggcggcaggaatgacgttgaaggctgaagatgtggcggaattaagggacaggctgaatcaaatggctgaagaaacccttacggaagaggattttattcccgttcaggaggttgatcttgtctgcggcgttgaagagataaccgttgaaagcattacagaattgaatatgctgtcgccgttcggcatgcttaaccctaaaccgcatgtgatggtgaaaaatgccgtacttgatgaagttcgcctgatcggagcgaataaaaaccacgtgaaaatgacggtgaaaagtgattccgccgtccttgactgcgtcggctttaacaaaggagagcttgaagccggagttgtccccggatcaacgatttccattgtcggcgagatgtccattaatgaatggaacaacagaaagaagccccagctgatgattaaagatgctgcggtgccggaatggcagctttttgatatcaggggcaagcggacgtgggaagacacggtcaccgcgctgccgaaggaaaaacgggtgctcatcagctttaacgaaaaaaccgctcagaagctccgtgcaaaagagctgtcgggcgagctggccgggatcacatcggaatccgaggcagaagctctccagcttgacggaaaatatgccgtttttctggatgtgccgccgtcagcggatcgcctgcagcatttgcttgacggaaagaagccggaacggatttattttgtttttatcaatcatgaagaacatttcctgtcctcatttccatcgcggaatgatttcaagtggttttacgcatttctcttgaaaaggggcgcttttgacttcggcaagcatggttcagagcttgcgagacacagaggatggtcaattgacacaatcaatttcatgacaaaggtgttttttgatctcggttttgttaaaatagaagatggtgtgctgtctgtcgtgagcggcgcgaaaaaacgcgacctggcagattcgcaaacctatcaggtaaaacagcagctgatggaattagaccagaagctcaattattccgcagcccatgagctgaaggaatggctgaataagctgatgaaccaaggttcagaagcttatgaaagtacgaggaggacatagaacagatggatcttaaaaaatacgtaacaattgtgcccgattacccgaaagaaggcgtacaatttaaagatattacgacattgatggacaaaggcgacgtataccgttacgccactgaccaaattgttgaatatgcaaaagaaaaagaaattgatttagttgtcgggcctgaagcgcgcggctttattatcggctgtccggttgcatacgctctcggagtgggctttgcgccggttcggaaagaaggaaaacttccgcgtgaggtcattaaagtcgattacggtttggagtacggaaaagacgtactgacgattcataaagatgcgattctgccgggacagcgcgtgctgattactgatgacttgcttgcaacaggcggcacgatcgaagcaacgattaagctagtcgaagaactgggcggcgtcgtagccggtattgcgttcttaatcgagctttcttaccttgacggcagagacaagcttgacgattacgatattttaacattaatgaaatattaaccgcatatggaaaaaagcactcgtgtcagggtgcttttttcctattatttcatcatcctgacagattctttaggtgttttgaacttctgccctttacatctctcgtttttttcttgataataaactaatacagtttacatttaaaaaaggtgattccatggcgaacgaacaagtattgactgccgagcaagtaatagataaagcgcgcacttatctgccggaggagcagattgcgtttgttgagaaagcttacctgtatgcgcaaaacgcgcatcgcgaacagtaccgcaaatcaggtgagccgtacatcattcatccgattcaggtggcgggcattctcgtcgatctggaaatggacccttccacaattgcgggcggatttctgcatgacgtggtagaggacacggatgtcaccctcgacgacctgaaggaagcattttctgaagaagtggcgatgcttgtcgacggcgtgacgaagctcggtaaaattaagtataaatctcaagaggagcagcaggcggaaaaccatcgaaaaatgtttgtcgctatggctcaggatatcagagtcatattgatcaagctggcggatcgccttcacaatatgcggacgttaaagcatcttccgcaggaaaagcagcggagaatttcaaatgagacgctggaaattttcgctccgctggcccatcggctcgggatttctaaaatcaaatgggagctggaagacaccgctctccgttatttgaatcctcagcaatattacagaatcgtcaacctcatgaagaaaaagcgcgcggaacgcgaactttatgtcgaagaggttgtcaatgaagtgaaaaaacgcgtcgaagaagtgaatattaaagcggacttttcaggacgtccgaagcacatctacagcatttaccgcaagatggcgctgcaaaataaacagttcaatgaaatatatgatctgctcgccgtccgtattcttgtcggaagcattaaagactgctacgccgtcctcggcattattcatacgtgctggaagccgatgccgggcagattcaaagattatattgcgatgcctaagccgaatatgtatcagtccctgcatacgaccgtaatcgggcctaaaggcgatccgctggaagtgcagatcagaacatttgagatgcatgagatcgctgaatacggggtggccgcacactgggcatataaagaaggcaaggctgcaaacgaagaagcgacatttgagaaaaaactgtcctggttccgtgaaattctggaattccaaaacgagtctaccgatgcggaagaatttatggaatcgctgaaaatcgatctgttttctgacatggtatacgtatttacgccaaaaggcgatgtcattgaactgccgtcaggctctgtgccgattgatttttcctacaggatccactcggagatcggcaacaaaacaatcggggcgaaagtgaacggaaaaatggtgacgcttgaccataagctccggacgggcgacatcgtcgagattctgacgtccaagcattcatacggtccgagtcaagactgggtcaaactggcgcagacgtcccaggcgaaacacaaaatccgccaattctttaagaaacagcgccgtgaagaaaacgtcgaaaaaggccgtgagcttgtcgagaaagaaattaaaaatcttgattttgaagtgaaagatgttttaacactcgaaaatcttcaaaaagttgccgacaagttcaatttctcaaatgaagaggatatgtacgcggcggtcgggtataacggcattaccgctcttcaggtggccaacaggctcaccgaaaaagaacggaagctgcgtgaccaggaagagcaggaaaaaatcgttcaggaagtcacttccgagccgaaacattatccgcaagggagaaaacgggaagcgggtgtgcgcgtaaaaggcattgacaaccttctcgtccgcttgtcgaaatgctgcaacccggtgcctggcgaccatattgtcggttttattacaaaagggcgcggtgtatccgttcaccgggatgactgtccgaacgtcaaaacgaatgaagcgcaggaacgtctgatccccgttgaatgggagcatgaatcacaggttcaaagacgcaaagaatataacgttgagattgagattttgggatatgaccgtctcggacttttaaatgaggtgctccaagccgtaaatgaaacgaaaaccaacatctcctctgtctccggcaaatccgaccgcaataaagtcgctacgattcatatggcgatttttattcaaaacatcaatcatctgcacaaagtggtcgagcggattaagcagatcagagacatctattcagtccgccgggtaatgaactaaaaggagcgcttgctatgaaattagttgttcagcgtgtaacagaagcgagtgtgacggttgacggcgctgttgccggccggatcggacccggcattatggcgcttgtcggcatcactcatgaagatacagaagaagatgccgcttacttggcggataaaatcgtgaatcttcggatttttgatgatgaaagcggcaagatgaatttatcgcttttggatacgggcggggagattttatccgtttcacagtttacgctttacggcgaaacgaagaaagggagacgcccgaattttatgaatgcggctaaaccggatcaggctgtgctcctttatgaaaagtggaacgaactccttcgggaaaaaggagtcaaagtggaaaccggaatattcggagccatgatggatgttcagctgacgaattccgggccgattacattgattatggattctaaacaataaaaaagctgccgttcggcagcttttttttatgattgaaaataatgttccaatccgctttcaattccgtctgtcactttttcctgatacgagccgctatgtatgattgtttcttcttgcggttgactgagatagccgagctcatacagcatggcaggccgtttattttccctcaggacgtaataatcgccaaacagaacgccgcgatccgggataggggaacgcttcactacttcagaatggacgtctgaggcaagctggcgatccttagacggactgtaataataagccgtgcttccccgtgttgacgtatcggcatagctgtcatagtgaatgctgataaaggcatccgcattccggtaatgagaggttgaaaccctagcctgcaggctgataaaagtatcatcctgtctggtgatatacacgtttgcaccggccgcccgcaatttttgggccagcagcttagcggttttaatggttacgtttttctcaaactttccggagtagccgatcgttccgctgtcttttcctccgtgtccgggatcaacgacgatcgttttgtttttaagtgagccgctgccgcctgacgtgtcgggagaaggtgcttcatctgtttcctcaccgctttttgacgtttgtacgacccagtttgccacatatgcggtttgtccgttttcaagccggacttcataccatttgccgcttgagccgacaatcgggtaggctgcgcctttatctgctctttttacgatagaagcggaagtcgaggccgagctccttaagttggtgccgccgtaaacaatatacgcttttttcgaggagcctgagcccgcagaaccgtcccccgagccggatgcgctgtccgatgagtcagaatcctttatgatgtagtggcttgctgcccagcctttttgcccgtttgcttcaattttcagccagccgtggtcttcacttaagatggaaacctttgttccgcgtgataatttagtcataatcgctgaatcatgtgacgctgcacttctgacattcaatgaagaaacgccgacagtcccgttttttgacccgcttcgggcggaagtggctttcgtatccgatccgccgctgtccgcggtgacgtattcggaagaaacccatccggttgtgccttgataagaaatgttcacccatccgctgttcttgtccagcacggatgcatgtgcgccttgcggaagtttgccgatgacttcatatgatgtccccgggccttttctgatgcggaggtcaggatcggtggaagtgaccgttccgcttgttgcggatgaatggtctgctcctccggctgtttttgatatcagccaggaaacgacccatccggttttaccggggctcagctgaagctgcacccagtctccctcttctttagcgatcgggtatctttcccctttttttacttcagccttaattccatagctcaggccgggaccgcctctgacattgatcttgtctgtcgcgatgaccgcttctccctctgcggcgattgcggtgtggaatgacggaagaagcgctgtgatgatgacgccgcataaaataagagcaagagttctcttcttcatggctgtcctcctttctgaactaactaaaatacattcttgtataatatcgtattttccttgctgaatgttaaataaaaataaaatggtttgtttatactagtcataaatacagcgaaaaggtgtgcaaatcatgaaatatcaaccaaaaatgggacgcgcgctgcacgatgcggaaggaaatctgcacttcagtgatcagagcgatagcgaaaaggcgggttttcttgaagagacggcgacggagttcggtctcttatcgaaagaagcggtcgcaaggaaaaacagacggaataaaacttgacaggggagtgcaatcccattattataatagaaattgatgtacataagtcatgataacgattttgaaccgataatggagaagagtaggtcagaatgcatggagaagagaggaaccgtcccgggctgaaagcggatccgcactgcatctttctcgaaacaacactccggaggttccctgctgaacgcttttgcaagtcattaggcagcggacgtgaacctgcgttaaaggtcagagcggggatgcttcggcattccaactagggtggcaccacgggtataactctcgtccctactatacatgtatagtaggagcgggagtttttttatttgaagaaagacattaaggaggcctgtaacatggcatatcacattccaagaggcacacaggacatactgccgggtgaatcagacagatggcagttcgtcgaacaaattatgagggagacgtgccgcacttatcaatataaagaaatccgtacgccgattttcgagcatacggaattgttcgcaagaggcgtcggtgagtctacagatatcgtgcagaaagaaatgtacacgtttgaagaccgtaaagggagaagcctgacgcttcggccggaaggaacagccgccgcagtccgcgcgttcaatgaaaataaattatttgcgaacccggtgcagccgacgaagctttattatgtcggaccgatgttccgttacgaacgtccgcagacagggcgtttccgccaattctatcaattcggaattgaagcgatcggctccaaagatccggccgtggatgcagaagtcattgcgcttgcgatgagtatttaccgtaaagccggtttgaaacatgtcaagcttgtgctgaacagccttggtgaccaggacagccgcaaatcctaccgggaagcgctcgtcaaacattttgaaccgcgcatcgcagagttttgctcagactgccagtcgcgtctgcacacaaacccgctcagaattcttgactgcaagaaagacagagagcatgaactgatgaaaacggctccgtccattcttgattacttaaatgaagaatcagccgcctattttgagaaagtaaaacaatacttaaacgatctcggcatcccgttcgaaatagatccgaaccttgtcagagggcttgattattataaccataccgcttttgaaattatgagcaatgccgaaggattcggagcgattacaacccttgccggcgggggccgctatgacgggcttgttgaacagatcggcggacctgaagcgccgggtatcggatttgcgatgagcatcgaacgtctgctggcagccattgacgctgagaaaacagagcttcccgtcaatcaggggattgactgctacatcgtgacgctcggagaaaaagcgaaggattattccgtttccctcgtgtacaaactgagagaagcgggcatctcaagtgaaatcgattatgaaaataaaaagatgaagggccaatttaaaacagctgaccgtctcggcgcacgttttattgcgattttaggggaagatgagcttgcccaaaataaaatcaatgtaaaagatgcggaaacaggagagcagcgtgaagtggtgttagacgagctgatacaagtgttaaaggcagatcaaaagcagtgaaggagaggaacgctatgtttggaagaacatattattgtggcgagataactgaaaaagcgattggcgaaaccgtcaaactgaaagggtgggtgcagaagcggcgcgatctcggcggcttgattttcattgatttgcgcgaccgctcgggtattgtgcaagtcgtgttcaaccctgacgtatcgaaggaagcccttgccgcagcggaagcaatcagaaacgaatatgtgcttgatatcgaaggcacggtttctgcccgtgaagaaggcacggtgaatcccaacctgaaaaccggtaaaattgaaatcaaagctgaagcggtgacggtgctcagtacggcgaaaacgcctccgtttccgatcagtgaccaggcggctgaggtttctgaagacgtccggttaaaacaccgctatttggatttgcgccgcccggcgatgtttcaaacattgcaaatgcgccaccaagtcacaaaatccatccgccatttcttggatgaaaacggatttcttgatattgaaacaccgattttaacaaaaagctctcccgaaggcgcccgtgattacttagtgccgagccgggtgcatgaaggagaattttacgcccttccgcaatcgccgcagatttttaaacagcttctgatggtgtcgggctttgaacggtattatcaagtggcccgctgcttccgcgatgaagacttgcgtgccgaccgccagccggaatttacgcagattgatatcgaaatgtcctttatgagtcaagaggacatcatggctctggcggaagagatgatggcgaaagttatgcttgaaacaaaaggtgttgaagtaccgcttccgcttccgcgaatgacatatgaagaagcgatgaacagctacggttccgacaagcctgacacccgcttcggcatgctgctgacggacgtgtcagacatagtgaaagatactgaatttaaggtgttctcatcagccgtggcaaacggcggcgttgtaaaagcgatcaatgtcaaaggcgctgccggcgactattccagaaaagatatcgatgcgctcggcgtttttgccggaaattacggcgcgaaaggtctcgcttgggtgaaagttgaagctgacggcgtaaaaggcccgattgcgaaattctttgatgaagagaagcaggcaaaactggctgaagcgcttgatgcttctgaaggcgatctgctcctgttcggcgctgataagtttgaggttgtggcccaatccctcggcgcgcttcgcttaaagctcggcaaagaacgcggcctgattgacgaaagcctcttcaacttcctgtgggttgtggactggccgttactggagcatgacgaggaagaaggccgtttctatgcggctcaccatccgtttacaatgcctgtccgtgaagatcttgacctgattgaaacggcgcctgaagatatgaaagcgcaggcttacgaccttgtcttaaacggctatgaactcggcggaggctcaatccgtatttttgaaaaagacgttcaggaaaaaatgttcgggcttctcggctttacaaaagaagaagcggaggaggagttcggataccttcttgaagcctttgaatacggcgcccctccgcacggcggaatcgcgctcggcttagaccggttggttatgcttcttgcaggccgcacaaacttaagagatacgatcgctttcccgaaaacggcaagcgcaagctgccttcttacggaagcgcccggcgaagtgagcgacgcccagcttgaagaacttcacctttctgtcaaaagaaaagtgaaacagtaaagatcagcagtttgtttcttgaaaatcaaaatctgctgtgatatgattttgacaagttaaataaagtcctgatgtgttagttgtacacctagttttgaccgaacatttttttgatttgggagcccgcatttttaaatggcgtacatgcctcttttcattcgttaagaggacttacaagatttaaaaaagggcacccacctgctgagagcgggttcaaaacgaaggaaagctgcaacggcacaattgggactttattttttgtgcgctaaaaccagcggctttttgacaagccgagtttataaaaccagaatgtggagtgaggttcttgttacatcagttttccagaaatgagctagcgattggaaaagaagggctggacacgttaaaaaacagcacggtggccgttctcggcgtcggcggagtcggttcattcgcagccgaagcattggcgaggtccggagtggggcggatcgtgcttgtcgataaagatgatgttgacattacaaacgtaaaccgccagctgcatgcgctcttgtcgacggtgggacagccgaaaacagacttgatgaaagcgcggatcgcggatattaatccggattgcgatgtcgtcgccttaaaaatgttttatacggaagagacgtatgagcagttctttgagcatccgctcgattacgtcattgacgcgtcggatacgattcattataaaattcatctgatgaaagaatgtctgaaacggaatgttccgctgatttcaagcatgggagcggcgaataaaacagacccgacacgctttcagattgctgatatttcaaaaacccataccgatccgattgccaaagtcgtccgcacaaggcttcgcaaagagggcattaaaaaaggcgtacaggtcattttttctgatgaaagcccgatcgtcatccgtgaagacgtcagaaaagaagtcgggaatgatgaagcgaaaatccgcaaagcgcaattgccgccgtcttccaacgcctgggttccgtcagtggccggtctgattatgggcggacatgttgttatggagctcttaaaggacatcgacattaaacgggttaaagataaataaaaagaaaaacagccttcttcaggaaaggctgtttttttatttgaatccgccgtttacacgaaagattttggccggtatcaaaaaagacaagaacacatagggtgtccttgtccggttattttttctgcttcatcagtttttcatacacttgctttatggcggcttcaaatttccccgtttgtttcggtttatagtattgcttgttttttaacggatcaggtaaatattgctgttcgacccatccgttctcgaaatcatgaggatattgatatccgatcccgcgtccgagctcttgggcccctttatagtgggcgtcttttaaatgtttcggcacatcgccgattttacccgtcctgatgtctttgagcgcctcatcaacggctgagatggcggagtttgattttggcgagaggcataattcgattaccgcattggccagcggaattctcgcttccggaaagccgatccgttctgcggtctgaatcgcgctcagcacccgggggcctgcctgcgggcttgcgaggccgatatcttcataggcgatcacgagaagccttcttgatatgctttcaaggtcgccggcttcgatcagacgggccagataatgaagggcggcgtttgcgtccgagcctcggatcgatttttggaaggcagataagacgtcataatgcgcatcgccgtttttatcatgagtatagctttttttctgcagacattcttccgccgtctcccgtgtaatccggatcgtgccgtcgcttgattcctttgtggagagtacggcaagctcaagtgcgttcaaagcggagcggacgtctcctccgcacccttgcgcgaaatgatccatcgcgtcgtcgtccaccgaaacgctgtaggaaccgagcccccggtgttcatctgtgagcgctctttccaatgcctgcttgatcagatcgggtgttaacggttcaagctcaaatatctgggtccggcttctgatggccgggttaatggcatgataagggttggcggtcgtcgcgccgattaaaataatcatgccgttttctaaatagggcagcagaaaatcctgctttcccttatcaagcctgtgcacttcgtcaaggattaaaatgacctggcctgacattttcgcttcctgtacgacaatctccatgtcttttttattatgaatgacggcattcaatttcctgaatgcgatgcttgtcgatcctgcgatcgctgtggcgatggacgtttttccgatgcccggcggtccgtacaggatcatggatgataagtgctttgcacgcaccattctgccgatgattttatcttctttgaccaaatgttcctggccgataatgtcttcgatattggcaggccgcatccgatacgccaatggtttcatgaacatctctccttacatatacagggtaacggaaaacggacgattagaaaagcgaattgcggcgggccccgtgtttcaatgaaaattaggataagttatgttataataacagttggtctataagatactaaacagattattcatatccatttacttgtataaattaacaattagaattgactggggtgttcatattgaaaatatcgacaaagggaagatacgggctcaccattatgattgaattggcgaaaaagcacggagacggtccgacgtcgctcaaaagcatcgcccaaacaaacagcctttctgagcattacttggaacagcttgtatcaccgctcagaaacgccggactcgtaaaaagcatcagaggcgcttacgggggttacgtgctcgggggccagcctgaagagataacggccggagatattatcagagtgctggaagggccgatcagcccggtagaagtgcttgaggatgaagagcctgccaagcgggagttatggatccgcatccgcgacgctgtaaaagacgtgctggacagcacgacgttagaagaccttgcgagctatacggacggcgagcaggaagcttatatgttctatatttaaaccagaggtgtacagacaatggaacggatttatttagatcacgccgcgacttccccgatggatgagcgtgtgctcgaagagatgaagccccatttcttcggcagtttcggcaacccgtcaagcattcattcattcgggagagaatcccggaaatgggtcgatgaagcgagagcggacatcgcgcgcgaaatcagtgcgaaagaacaggaaattattttcacaagcggcggcacggaggctgataatttagcgattttcggaacggctgccgcccggaagaatgaaggaaagcatatcattacgaccgctattgagcatcatgctgtattgcacgcctgcgaaaagctggaagaagacggctttgaggtgacatacctcatccccggcccttcaggacggatcagtgcaaatcaggtgaaagaagcgctccgtgatgatacaatccttgttaccgtcatgtatggcaataacgaagtcggtaccattcagccgattgacgaaatcggagagctgttaagcgggcatcaggcctattttcacacagatgccgtccaggcattcggttatatgccgattgacgtgaaaaaaagcagaattgacatgctgtctgtttccggtcacaagcttaacgggcctaaagggacaggctttttatatgtaaatcaagaggtgaagctgtcaccgattcttctcgggggagagcaggaacgaaagcgccgcgcggggacggaaaatgtaccgggcatcgccggcttaaaagaagcggtcgtcctttcaaaccgtgagagggaagagaaaacagcgaagtataaggagtttaagaacattatcatgagcacgctggaaaaatccggcgtcacagcggaggtgaacggagatgccgagaaatgcctgcctcatattttaaacctttactttcccggtgtgccggtggaagcgctgctggtcaatcttgacatggaaggcgttgccgtctccagcggatctgcttgtacggcaggatccgttcttccgtcccatgtgcttacggccatgttcggaagtgagagcggcaggctgacttcgtcaatccgcctcagcttcggcctcggcaatacggcggaacaaatcgaaacagccgccgaaaagcttgccgccgtcgttaaacggcttgcttaaaacggcggacttacgtttttaatggagtgaatgcaaatggaaaaacggccggaggatacaagagtcgtagtcggcatgtccggcggcgtggactcttccgtggcggcccttctgctgaaggagcagggctacgatgtaatcggaatctttatgaaaaactgggatgatacggacgaaaacggtttttgcacggcgacggaagattatgaagacgtcatccgggtctgcaaccagatcggaattccgtattatgccgtcaattttgagaagcaatattgggaaaaggtatttcaatatttccttgatgaatataaagccggaagaacccccaatccggatgtcatgtgcaataaagaaattaagtttaaggctttcttggatcatgctctgtcactcggcgcggattatcttgcgacgggccattacgcccgcgtggacagaagcgcaggtacagtgcgcatgctccgcggtctggatgaaaacaaggaccagacttattttctgaatcagctcaatcaggaacagctcagcaaagtcatgttcccgatcggtgatctgcaaaaaagccgcgtgcgggaaatcgccaaagaagcggaacttgcgacagctgcgaaaaaagacagcacgggaatctgctttatcggcgaacgcaacttcaaaacgtttctcagccaatatctccccgctcagccgggcgatatgatgacaatggacggagaagtaaaagggcgtcatgacggtctgatgtattatactatcggacagcgccacggtcttggaatcggcggaagcggcgagccgtggttcgccgtcggtaaagatcttgaaaaaaacattctgtatgttgatcaaggattccataatccgcttctgtattccgataagatcacggcgacaaatgtcagctggacgcgtcccggtctgatggacggcggcgaaatgacatgcacggcgaaattccgctaccgtcaggaagatcacaaagtaacggtgaaaatgacgggtgatgatgaagcggaagtcatttttgacgggcaggtacgcgccgttacgccgggacaagccgtcgttttttatgacggagaagagtgcctcggcggcggaacgatagatgacgtttataaagacggaacaaaactgtggtacgtataatacatgtaaaaaacctcaactcgcatgttggggttttttagcgaaaggaagttaaaaatggattataataaaatcgggattgacgccatgcaggagggcgattttgaaaaagcggcggaggcttttacgaaagcgattgaggaaaacggtcaagatccggtgccgtatatcaacttcgcaaatctgctttcttctgtgaacgaactcgaacgggcgcttgcattctataacagagcgctcgaattggacaattcggcggcagccgcttattacggtgcgggaaacgtatatgtgatgaaagaatcgttttccgaagcgaaggatatgtttgaaaaagcgcttcgctccggaatggaaaacggagatttgttttatatgctggggaccgttctcgttaaattagagcagccgaagcttgcactgccatatttgcagcgtgccgttgaattaaatgaaaatgacacggaagcacgcttccagttcggaatgtgcctcgcaaacgaagaaatgctggatgaagctctggcgcagtttgagacggtgatcgagcaggacccaagccacgcggacgcattttataatgccggggtcgcttacgcgtacaaagaaaatcgtgaaaaggcgcttgagatgctggaaggcgcaatcggcatacagcctgatcatatgcttgcgcttcatgcgaaacagcttatcacccagtcataacaaaaggagggaaggctcgtggatcagctgaacatcgaagaacagccgtatgtaaaaggcgtcattcatacggtcatttatcacaatgacaccaacctgtatacagtgctgaaagtcaaggttgcagaaacgtctgaggcgatcgaagacaaggtcgtatccgtaacgggctacttccctctgctgcaagaagatgagacctacacattttacggaaaaaccgccacgcatcctaagttcggcctgcaatttcaggctgaacactttaaaaaagaaattccgaccacaaaagaagggatcattcactatttatcaagtgatctgtttgaaggaatcggaaaaaaaacggcggaagaaatcgtcaaaaagctcggagacggcgcgctcaataaaattctgacggatgcatcggtgctttacgatgtgccgaaaatgtcgaaaaagaaagcggataagcttgccggagagctgcagcggcatcaggggcttgagcagattatgatctctctgaaccaatacggtttcgggccccagctatccatgaaaatatatcaggcctacgaaacggaaacactggagaaaattcaggaaaatccttatcagcttgtaaaagacgttgaaggcatcggctttgtgaaagctgacgagctgggcggaaaaatgggtctgtcaggaaaccacccggagcggatcaaagcggctatcttatatacaattgaatcgacctgtctttcagagggccatacgtacatagaaacaaagcagctgataatcaatacgcaaacgctcctgaatcagtcagctgaaggcggccgcgtcacggaaatggatgcggctgacggcatcatcgccctcggagagagtaaggatatcgtcatagaaggagaacgctgctattttccgtccttgttttacgccgaacaaaatgtcgcaaaacgcgtgctcgacattgcggctcagacggagtatgccgatcaatttcctgaatcggaatttctgcttgcactcggtgaactggaagaacggatgaatgttcaatacgcaccaagccaaaaggatgccattcaaaaagcgctgtcttcaccgatgcttttactgaccggaggacctgggacggggaaaacgaccgttattaaaggaatcgtggaattatacagtgaactgcacggagtatcgcttgaccccggtgattataaaaaagacgaggcgttcccggtgctgcttgccgcgccgacgggaagagccgcaaaacggatgagcgaatctacgggtctgccggctgttacgatacacaggctgctcggctggaatggcgctgaaggctttacctacaatgaagatcagccgatagaagggaaactgatcattatagacgaagcgagtatgctcgatatctggctcgccagccatttgtttaaggcgcttcctaagcacattcagctcattgtcgtcggtgatgaagaccagcttccttcagtaggaccggggcaggtgctcagagaccttttggcttctgaggtgctgccgaccgtgcgcctgacagatatttaccgtcaggctgaaggatcatccattgtggaacttgcgcatgatatgaaaaaaggactgcttccaaaggggctgaccgcgccgacaaaggaccgctcatttatccgctgtaattcttcacagattaaagaagtcgtggatcaggtcgtctcgaacgcgttaaaaaaggggtatacctccagggatattcaagtgcttgccccgatgtacaggggaaaagcgggaattaacgagctgaatatgcttcttcaagacatcatgaatccgccgaaagaaaaaaggcgggagctgaaattcggagatgtcgtctacaggacgggcgataaaatattgcagcttgtcaaccagccggaaaacaatgtgtttaacggcgatatcggcgaaatcgtatccattttttatgccaaagaaaatacggaaaaagaagacatggtcgtcgtctcatttgacggcaacgaaatcacctttacgaaaaaggatttcagccagtttacccacgcgtactgctgttcgattcataagtcgcagggaagcgaattcccgattgtcgtcctgcctgtcgtcaaaggctactatcgaatgctcaggagaaatctgctttataccgccattacaagggcgaaaaaatttctgattctttgcggagaagaagaagcgcttgaatggggcgtcaaaaacaatgatgccaccgtcagacagacatcgcttaaaaacaggctcacagagcagactgaagagatggatgcagaactggccgccctgcaaaaagagctgccgttcagtgtatatgatgcgaacatcggaatggaaggcatcacgccgtttgactttatggaagaaaaagcgtaaataaaacccggagcataaacaagcgccgggttttcgcctgtggaagtcatttcaaagtatgctgcccggcttcttggcaaaacctatacgtgttcaacaaaaggtggttgatcacactttgagaacatgccatgcagctgaaggacgaacagtatatgacgaaaacaccgggcgcagtctcgggatgatatcggatgtatgtttctctctggacggccggtttctcggtttcgtgctggagcagaaacgcctgtttcataaccgccatctttttttagaggcaagtgatataaaagagatggatcaagaagccgtagctgccggtcatgctcatttgcagcctttgccgaagagctgtttcacttttgaacagattaagatgcagccggtgaaatcgcctgatggtgaaatgttcggtttgctggaagatgtatacttttgtttggacaggggcataatcgtagcatatgaactctcggacggcttcttttcagatctggctggcagacgccaagtgcgccgcgccgccgatacgcttattgaagcggggaaagaaggcatcgtcctgaacggataagaggtgtagtctgtgcttgtatgtccgaactgcaaaagtaaagatatcggcaaaatcggcgtaaaccaatactattgctggggctgcttcattgagctgacggtagccaaaggcaaaattgcgacacatcaagtagaggaagacggcacgttaagcagtcttgatgatttgttttctgaagacgaacgcagtatcaatttttaaagttgaaaggagatacgcgcgatgggcagaacaatgacctctctgttggctttaggagctggagccgttatgtatcgtatggcttctcagtccgatatgctgaataaaaaaggtatgaaacggatgagaagacgagtcatgaaaatgttttaagcagaaaaaaggatacttctccggaagtatcctttttacgtttgtctcgcttccagccggctggctgcgagagacaggctgtaattgaccgcgaaatacatcagggctgccagcagaaagatcgggaaaaaatatcctccgtcagcgctttgtccgtttaagatctgcgcgttatgaatcagttcgggcagagcgatgacgaccgcaagtgacgtatcctttaataaggagataaactggctcacaatcggaggaaccatacgcctgagcgcctgcggcatgacgacgagaaaaagagtctgcgtgtacgtcagtcctgaagaacgcgccgcttcaatctgtcctttgtcaacggattgcaaaccgcttctgatgatttctgacagcatggccgattcaaaaatcgtcagcgccgtaatggcggccgcggtaatttccagtttgatcccgatttccggaagggcaaaaaacgtaaagaaaatgattaataacagcggcaggttgcggatggtttccacaatggccgctataatgcccgagacgataggaattttcgcatagcgcaaagtgccggcggcaagcccgaaaataaaactcaggacaatggagatcagcgcaacataaagtgtgaccaaaaagccgtcccataaaaacagcagatggtcaggtgtataggcgccgctaaaatccatgtttttcactctccttctctaataactctttccgagatgtctttccaaatagtgaaccccgatgctgagcgggatcgttactatcaaataaaaaagcgcgacgaaaatatagacatcaaacacgacaagagtgcttgaggaaacgagatccgcctgatacatcaaatcgagtcccgccaccactccgagtattgatgagtttttgacaaggttgagaaattggtttccgagcgggggaatcacgatttttacggcctgaggaagaatgacgtatctcatcgcctgactgtaggtgaagcctgacgatctggccgcttccatctgccctttggagacagtctgaattccggctctgatggcttctgcgataaaggccgacgtgtatatcgtaagcgcaatcgttcccgcctgaaagccgtccaatctcagcccggcgttcggaagtccgaaataaaaaacgaatgtgatgaggagaagcgggatgttgcggataaattccacatacgcagtgccgatccattgaaggggtttgaaagccgtgattctcatgactgcgatcagaacgcccagcgcaaagctgcctgccagcgcgatgaagctcgcaagcaatgtgtgcaggaaaccgtccatatacatatcgaagttttccgttaaaattgaaaagttcatctatgtcactccttataaaacggggatgagcatgcctgctcatcccgcggtcctttctattttgccggttcttctttaatccattttttatagattttttcgtacctgccgtcggctttcatttttttcaaagaggcgttgatttccttgatgagtccggattggccttttttgacggcgattccgtaaggttcatcggtgaaggtttcgcctgtcagctgatattgtttattttcatctgccatgccgtataaaatcgcattatcggttgtgagcgcatctccctgtcccgctttaagcgcagtgaacgcttcggcgtaattttcaaattccagcactgaggcgtcaggcgctttttctctgatgttttgtgaggaagtagagccttttaccgccaatacttttgagccttttcccaggtcttcggtgcttttgatgctgcttccttttttgacgagcagggattgcccggcttcaaaataaacatctgagaaatcaacttcttttttccgctcatccgttatcgtcatcgtggcggtgatggcatcgatatcgccgttttgcagcatcggaattctcgtttttgacgtcacttctttaaattccgctttcttctcatcccccagaatatcttttgcgagctgttttgagatatcaatatcgaagccttcaatatcaccggagcttgggtttttcagcccgaataacctcgtgtcggttttgacgccgaagatgattttgtctctgtctttaatagaggctaacgtgtcttttcccgttccttttgaatctccggacgtttctttccctccgcaggcggccagcataaagacggccagcagtgatatcaatccgaatgacaaccattttgttacgcgtgacataagcgctcctccgtttcttttcagtgatttaaaatacggcttaagaataaacgcgccctctcttcacgggggctttcgtaaaattcagccggtgcagcttcttctaagatggctccgccgtcgataaacacgatgcggtccgccacttcttttgcgaatcccatttcatgtgtgacgactgccatggtcatgccttcctttgcgagtgttttcatgacatccagcacttccccgatcatttccggatcaagcgcggatgtgggttcatcaaacagcataatttcgggcttcatcgcaagccccctggcgatggcgacacgctgctgctggccgccggaaagctgtgaaggataagcgtccgctttttccggtataccgacttttttcaaatagtataaggccgtttcttttgcttcttcttttgattgcttaagcactttgatcggtgcgagcatgatgttttgcagaacggttttgtgcgggtacagatgaaaatgctggaacaccatgccgatattgcggcggaccttatttatatccgttttcttgtcatggatggagacgccgtttaccgttaaggcgcctccatcaactgtttccagctgattaatgcagcggagaagcgtgctttttcccgatcctgaaggtccgatgataacgacgacttccccttttttaatgtgcagattaatgtttttcagcacgtggaaatgtccgtagtgcttatttacatcctgaaatgaaatcatggccatcctccttaaaaaaacatgagtcatattgactggacagtttttgaaatcctttaacacattacgatggttatacagatttttatgaatattatttagattatttcgtaatttctgataattttttccgtcaagaggtctgcgtcataaggcggagtttatgaaacgggaataattccggctttctgtcaaaagataaagcaagaggtgaaacgtcatgcttcaaaaaccgctgcagctcttaatgtggacggctgtatgtctgctcgttttgttaacagtgtatgtcttttgcatgctcgatatgttatggtctcccatttggcttgttataaaatctctctttattcctatattcatcgcagtatttattgcttatcttttacttccgattactgaatggcttcatagaaaagggatgcctagaactttaagcctgcttctgatttattgcctgtttttcggcggaatcggctggggggtttataaaggggttcctgttttaattgaacagctgcaggatctgtctgagagcattcccggtcttgccaaaaactacaacagcatgctgaagcatctgcataatcacacggatcattggcctgacggcatgcaccatcgaatggacaaaatgattcagcagacagaaacgtttcttgccggcacgattgaaagcacgatcagaagcatccgtttcgtgcttgattatatcctgatcgcggcgacgattccttttctcgtgttctatatggtgaaggatatagacgtcatgaaaaagacagtctggtatttgacgccgaagtcctggagaaaaagggggagtgaatttctgcgggatgtggacgactctctcggtgattacatccgcggtcagcttctcgtttgttttttgctcgggctaatagccggcgtttcattttggctgttcgggcttccttacccgctgattttgggccttgccatcgggattacgaatgtcatcccgtatttcggtccgtttatcggcgctgtaccggcgctgctccttgcgctggcgatttctgctaaagctgtgatcatcgtaatcgtcacgatttttattctgcaatttatagaaggaaacattttgagcccgcttattgtcgggcgcagtctcagaatgcaccccgtcgtgatcatgctggcgctccttgccggaggagagctcgcgggcattcccggcatgattctcgctgttccggcggcagccgttttaaaagtgacggccatacactttttgcggatcaggacggaacattgacattcgggttctgcttgtctataatttcgagtagaatacatacgaatctcgagtgacggatatgagtacgccgaagccctgtttaagagagaagctccgatacgctgaaaggagcttcagcagaagatcggccgaagctaatcctgagtgcagttaaaggctgccgcagtcctgcgttacgggatgaaaggtgacaggcctttttcggcctgtaatcagggtggtaccgcgagacagctctcgtccctgtgtgaacgcatggtttgcatagggagagagcttttttgctgtcgcaaaagagaatttcgggtagtgataaggaggaatatagatgaaacacttaacttctgctgaagtgcgtcaaatgtttttagatttctttaaagaaaaaggccatgccgttgaaccgagcgcctcattggttccgcatgaagatccgtctttattatggatcaacagcggcgttgcgacgctgaaaaaatactttgacggccgcgttgtgccggagaatccgagaattgtaaacgcgcaaaaatcaattcgaacaaatgatattgaaaatgtggggaaaacggcgcgccaccacacgttctttgagatgctcggaaacttttccatcggtgattattttaaagaagaagcgatcacgtgggcatgggagtttttaacgagcgaaaagtggatcggctttgatccggagctgctgtctgtaacggttcaccctgaggatgaagaagcttatacgctatgggcggaaaaaatcggcgttccggaagaaagaatcatccgtctggaagggaacttctgggatatcggcgaaggcccgagcggaccgaatacggaaattttctatgaccgcggcgagaaatacggcaatgacccgtcagattctgaattgtatccgggcggcgaaaatgatcgttatcttgaagtatggaacctggtattctcagagttcaaccacaacccggacggcacgtacacaccgcttccgaagaaaaacattgatacgggcatggggcttgaacggatggtctccgtgattcaggatgtcccgacaaactttgacactgatttgtttatgccgattattgaagcaacagagcgcatttccggagatgcttacggaaaggatgcagtgaaggatacggcctttaaagtgatcgccgatcatatcagaacggtcgcatttgcggtaagcgacggggcgctgccttcgaacgaagggcgcgggtatgtactgagacgcctcttgcgccgggcagtgcgatacgcgaaaaccatcggtatcagccgtccgtttatgtacgaactagtaccgactgttgcaggaattatggacgctttctatccggaggtgaaagaaaagcaagagtttatcgccaaagtcatcaaaacggaggaagagcgcttccacgaaacattaaacgaaggtctggccattttatccgacgtgataaagaaagagaaggaaaaaggcagcggcatcatctccggaaaagacgtattcaaactgtacgatacgtacggattcccggttgaattgacggaggaatacgcggaagatgagcaaatgacggttgaccataaaggctttgaagccgaaatggaaaaacagcgtgaacgggcgagaaatgcgcgccaagatgtaggaagcatgcaggttcagggcggcgcattgcgcgacattaccgcagaaagcacatttgtcggctacagtgccgtaaaagctgaagcgaaggtgatcgagcttcttcatgacgggcaattaatcagcgaggcgcatgaaggggataccgtccaaatccttcttgacaaaacgcctttctatgctgaaagcggcggacagatcggtgacagaggagtgctgagaagcgagcaggctgtcgtaaccattaaagacgtgaaaaaagctccgaacggtcagcatgtacacgaaggcacggtggctagcggcacgattcaaaaaggcgcaagcgtgacggctgaagttgaagatcaaatgagaagcggcgtggtgaaaaaccatacggcaacccacctcctgcaccaggcgctgaaagacgttctcggcacacatgtcaaccaagcgggttcactcgttaccgaaaatcgcctgcgttttgacttctctcatttcggtcaagtgacgaaagaagaacttgaacgcattgaaggaatcgtcaacgaaaaaatctgggagagcattccggtagcgattgatttgaaaccgatcaatgaagcgaaagaaatgggcgcgatggccctgttcggcgagaaatacggcgatattgtccgcgtcgtacaagtcggagattacagccttgagctttgcggcggatgccatgtcacgaatacggctgaaatcggcctgtttaaaatcgtatccgaatcagggatcggcgcagggacgcgaagaattgaagccgtaacaggaaaaggcgcttatcaggaaatgaacagccagctcagccttctgcagcacgctgcggacgagctgaaatcaaacgtaaaagacgtaccgaagcgaattcagtctcttcaagcggagctgaaggaagcgcaaagagaaaatgaatcattgctcagcaaacttggcaatgtggaagccggagccattctgtctaaagtaaaagacatcggcggcgtaaaagtgctggctgaaaaagtaaatgcgaaagacatgaaccaccttcgcactatggtggatgatctgaaagcgaagctcggttctgcggtcatcattctcggcgccgtgcaaaatgagaaagtcaacctttcagcaggcgtgacgaaagacctgatcgaaaaaggccttcatgccggcaaaatggtcaaacaagcggctgaagtctgcggaggcggaggcggaggccgtccggacatggcgcaggccggcggaaagcagcctgaaaaattggaagaggcgctggcatctgcggaagattggataaaatccgttttataatcctttcaagtagtgtagaatgatgataagatgaggacctcaggctgaactttgcctgcgaatttgggaaagaggtgcaaaacggtgagctcgtttgataaaacgatgaaatttaatttctccgatgattctgctgaaacaaacgtcgaagaagtgctgaatacggtatatgatgcgcttcaggaaaaggggtacaatcctatcaaccagattgtcggatacttgctgtctggagatcctgcatacattcctaggcatcgcgacgcccggaacttaattcgcaaactggaacgtgacgaattaatcgaggaattggtaaaatcctatctagaacagcataaagaggcgtaaatacattcatgagaatattgggacttgatcttggaacgaaaacactcggcgtagctttaagcgatgaaatgggctggaccgctcaaggcattgagacgataaaaataaacgaggctgaaggagattacggtctggaccgtttatccgagctgatgaaagactataatgtagagaagatcgtgctcggttttccgaaaaacatgaacgggacgatcggtccgagaggcgaagccagccaaacatttgcgaaactgcttgaaacagcgtacaatgtccctgttgtgctgtgggacgagcgtctgacgacgatggcggctgaaaaaatgctgatcgcggctgacgtcagcaggcaaaaacgaaaaaaagtcattgataaaatggcggctgtcatgatccttcaaggatatctggacagtttaaactaagaggtgaaaaaaatggaacacggcgaaaaacacattacaattgtcgatgatcaaggcaacgaacagctttgcgaagtgctgttcacatttgaaaacgacacattcaacaaatcttacgtactttattatccgattgatgctcaagacgatgatgaaatcgaaattcacgcttcaagcttcgaaccgaacgaaaacggtgaagacggcgaactgatgccgattgaaaccgatgaagagtgggaaatgatcgaagaaacgctgaacacgtttttagcggaagaagacgaagaataaaatgaacggaaaaagccggagcgcatatgcgcttcggcttttttttgtaataaattgccgaatgcacatgaatcatgtagtataagagctgttgggaggaaaatacttgtatgaatatcaatcagactaaacattcatttccgcgtaaaaacaaaaaaacgacgataatactgtcctccgtgatcgctctgcttatcatcatttgcggtgcttttttctatgggaaatctctgctgtccccggttgacaaaggcagcaaaacggcagtcaatattaatattccgagcggttcttccgtttcggcaatcgctgaaattcttgaggatcagcatgtcatcaaaagcaaaaaagcatttcagctgtatgtgaagtataaaggcgcttccgggtttcaggcgggattttaccacctgaataaaggaatggatgcggatgcgattatcaaaaaactgaccgcgggatcaacgggatatgcctttcagatctccgttcctgaaggaaaacagcttacgcagattgcggaggcgatcgcaaaagaaacatcatattcaaaagaagagatcatggcgaaactggatgacaaaacattcatcggcaaactgaagaaacagtttcctgatacgataacggacgcactttcaaacaagaagctcaagcatccgctcgaaggctatctgtatccggccacatatccgtttaatgatccggatgcatcgcttgacacgattttgacggcaatggttcaggaaacaaacacccgtatcgaaacgtataaatctgaactggaaaaaaagaaactttccgtccataacgcgctgacgatggcatcgcttattgaagaagaagccaccgccaaagccgaccgtcacaaaatcgccagcgttttttacaacaggctcgaagaaaaaatgccgctgcagactgacccgacggtattatatgcggccggtaagcataaaagccgggtctactacaaagacctgaaaattgattctccgtttaatacgtataaacataaggggctgccgccgggaccgattgcaaatgccggtgattcatcatgggaagcggctctccgccctgacaaaacggattatctctatttccttgcaaaatcaaacggcgaggtcgttttcaccaaaacattaaaagaccataataaagcgaaggaaaagtatatttccaaaaaagacagcgaataaaaggagggcaaaagctctccttttattccattctgaaaggttttatgataaaatatatcgggttgtttacttatggatagagaagtgtcttaagagagtgtccccgcggattcgtcaggggcactcctttttagaacggaggctgtttgccgtgaatgatcggtatgaacaaataaacgagtatataaacgcgatgctgaagcctcggcctgataaagtgaaaaagcttgaagcctatgcaaaagagcaccatgttccgattatggaagaagcgggcattgaagtgctgcttcaaatgctgtcgattcaacaggcgaaaaacattttggaaatcggcgcggcaatcggatattccgccatacggatggcgcttgagcttccggatgcgaatatttacacgattgaacgggacgacaaacgctatgaagaagctgtgaacaatataaaagactttgaaatggaaaaccggattcacgtaatgcacggggatgcgctggaactttctgagtctgtccgtgtcacggctccttatgatgccatttttatcgacgcggccaaaggccagtacacgaacttttttgagctctatgaaccgatgcttgcgccggatggagtcatttttacggacaatgttctgtttaaagggctggtggcgcaaaatcactcggacattgagccgaaaagaagacggaagcttgttgaaaaaattgatcaatataaccaatggctgatggaccggcctgactatcaaacggtcatactgccggtcggagacggcatcgccatcagtaaaaagaagaggtgaaggatcatgaaaaaacctgaacttttggtgactccgacttctgtacaggatattcttccgctcattcaagcgggcgcaacggccctgttggtcggagaacagagatacggcctgagactggccggtgaattttcaagagaagatataaaagaagccgtaaagacagctcatcaggaaggcgcgaaagtgtacgccgccgtcaatgctatttttcacaacgaaaaagtggacgagctgaacggctatcttgcctttttgcaggaggccggcgttgatgcggctgttttcggtgatccggccgttttaatggcggcgcgtgaagcggctcccgagcttaaactgcactggagcacggaaacaacgggaaccaactactattcctgcaattactggggacgcaaaggcgcacggcgggcagtgctggctaaggaattaaatatggacagcatcattgacataaaagaaaacgccgaagtggaaattgaaattcaaatccacggcatgacgtgcatgttccaatcgaagcgttctttagtgggccattacttcgaatatcaaggtaaagtcatggacatcgaacagaagaaaaaagaagcggggatgtttctgcatgacaaggaacggggcaataaatacccgatttttgaagatgaaaacggcacgcacatcatgagcccgaacgatgtgtgcatgattgatgaattagaggacctgatggacgccggcatcgattctttcaaaatcgacggagttttgaagtctcctgaatacttaactgaagtgacccgcatgtacagagaagcaatcgatttgtgcttcgaaagccgagagacatacgaagagaaaaaagagagctggatagagcggattgaaagcattcagcctgtgaacagaagcatcgacacaggattcttctttaaagaaacggtctattaaaaaggagggtgcaacggatgacagccgtaaatcaaaccatttccaaagtcgtaaacggaaaacgcgtcattacgaaaaaacctgaactccttgctccggcaggaaaccttgaaaaattaaaaattgccgttcattacggagcggacgcggtttttatcggaggacaggaatacggactccgctcaaatgcggataacttctcaatagaagaaattgcagagggcgtagaatttgccaaaaaatacggggcaaaaatatatgtgacaacaaacattttcgcccataatgaaaatatggacggtctggaagaatacttaaaagcgttgggagacgcaaaagttgccggaattatcgtcgctgatccgctgattattgaaacatgccggagagtggccccggacgtagaaattcacctcagcacacagcagtccctttccaactggaaagcggtgcagttctggaaagaagaagggcttgaccgcgtggtgcttgcccgtgaaacgagcggactggaaattaaagaaatgaaggaaaaggtggatattgaaattgaaacctttatccacggcgccatgtgtatcgcttattcaggccgatgcgtgctgagcaatcacatgacggcccgggattccaatcgcggcggctgctgtcagtcctgccgctgggattatgacctgtatcagacagacggtgcaaacgcggtcgcgctctatgacgaagaagacgctccgtttgcgatgagcccgaaagatttaaaattgattgaatccatcccgcaaatgatcgagatgggcatcgacagcctgaaaattgaaggccggatgaaatcgattcattacgttgcgacggttgtcagcgtgtatcgcaaagtcatcgacgcatactgcgctgatcctgaaaactttgtcattcaaaaagaatggctggatgagctggacaaatgtgcaaaccgggataccgcgcctgctttctttgaaggcacgcccgggtatgaagagcagatgttcggcgaacacggaaagaaaacaacatttgattttgccggtctcgtgctcgcgtataacgaggaaactcaaatggtgacgctccagcagcgcaatttctttaaacaaggtgacgaattggaatttttcggtcctgaaatcgacaatttcacattcacaatcggcactatttgggacgaagacggaaacgagcttgatgctgcccgccatcccctgcaaatcgttacatttaaagtagacaaaaagatttatccgagcaacatgatgagaaaggggaagtaatcaccaatgggtaagagtcctgtagttataggcatcgcaggaggttccggatcaggaaaaacaagcgtcacccgttccatctatgaacagtttaaaggacactcgattttaatgatccagcaagacctttattataaagaccaaagccatcttccgtttgaagaaaggctgaacacaaactatgatcacccgctcgcatttgataatgactatttaatcgagcatattcaagagcttttgaattaccggccgatagaaaagccgatttatgattataaactgcatacgcgttctgaggaaaccattccggttgagccgaaggatgtcatcattctggaaggcattctcgttctcgaagataaaaggcttcgcgacctcatggatatgaaactttatgtcgacacggacgcggatctccgtatcatcagacggattatgagagatattaacgaaagaggccgttcaatcgattctgtcattgagcagtatgtgtccgtcgtcagaccgatgcacaatcagtttgttgaaccgacaaaacgctacgcggacatcattattccggaaggcggacaaaaccacgtcgcgattgatctgatggtcacgaagattcaaacgatccttgaacaaaatgcaattttgtaataccatagcatagacataaataactcagaccatattatgtataggctggaagggaatgagacagttcccttctttccctgtttataaaccgaaacatttgcagaaaacacacattcagtttaagataaacagtacctatatgggagagaagaacgaggactgccctgtgttctcattcttgattttttcgtttatgctctcatacataatcacacgttattgttgagggacaaccaccaaggagtgaaggaacatggcacaagaaaaagtttttccgatgactcacgaaggaaaacaaaaacttgaacaagaattagagcaattgaaaacggttaaacgcaaagaagtagtagaacgcattaaaatcgcaagaagcttcggagatctgtcagagaactctgagtatgattctgcaaaagaagaacaggcatttgtggaagggcgcatcacgacgcttgaaaacatgatccgcaatgcgaaaatcatcgaggacgacggcggttcaaatgtagtcggtttgggaaaaaccgtatcattcatcgaattgccggacggtgaagaagaatcttacacgattgtcggaagcgctgaagctgatccgtttgaagggaaaatttcaaacgactcgccaatcgccaaaagcctgctcggcagaaaagtggacgaagaagtgacagttcagacgccgggcggagaaatgctcgtgaaaattgtgaaaatttcataagatccgtttaacattgaaacacctcgtccaaaatgtggatgaggtgtttttttatgatcgtatcaaaaaggctgaaagcggccgtgatttgttttctgctcgtgtttttctttctgcttgcgaggctggctgaaattcagctgttttttacagaatctttttcaaaatccaatattaatctgattcaggaaagcgtcaagcagcggacggaagaagtccttatttcagacggacgcggctcttttcttgatcggaacggcaaagaactgaccggaaaaaagcagcctgccgtcatactgtttcccttcctcgtgacgcaggattggccggttgaccgggtatctgacattctcggaatgaaacagggggagctcaggcagctgctcacggaagcgaaaaaaccggtgatcctgaacagcagaaaaataaaacatttgacgaaacaatccgtgtcaaatatcaattctttgaaatatcccggcatttacggcgtatatatgaaagacagcaaagaaacaaacatagccgctcatctgttgggcgcgacaaaccaggaccctgagcttttgaaaaagaaataccccggcaggaaggaactgccgatcacggcaaaaatcgggacaagcgggatggagcggacgtttgatgagtttttactggcggatcaggacacaaaacttttgtatcatgtcgacggaaggggaaaccctttattcggaatggacgtcaaatatacggctgaagcaaacgcgttttatccgctgcaagtcaaaacctccatcgaccgcaatattcaaaaagcaatggaagatgtattgaaagaccgcgggttaaaaaaggggggagccgtccttttagacattgaaaaaagcagtgtgctcggaatggtatcaaagcctgacgccgacatgtcaaagcagcagacactgcaaaattacatgctgacgccgatttatccgggatcagtgtttaaaacggtgatcgccgcagccgcaatagaacaaaacgaagtgaagccgggcacatcctttaactgcaatctcaacctgtacggagagccgggggatgacaaaggcacgctcagttttggagaaagctttgcccaaagctgcaattatacgtttacaagccttgcggaaaaattgatcaaaaaagatgattccgttattgaaaacatggcggaaaaacttggtctcacccagcgggcggggtgggaaggcaagctgtaccgggaagacggattcaggcagctgtataatgaaaaaagcggggtcatttggggagatgacaaagacaaaaccgtaaaaaaagccgtcgcacagacggcgatcgggcaaaaaaacgtgaaagtcacgcctcttgaagtcgccaatatgatggcggcgatcgcgcgcggcggtgaaaaaaaacaagtcaaaatcgcggacaaaattgaatacaaaaacaaaacgacgatggcgtcattcaaagatcagccgttaaaaggggaaaacatcgacaaatatacggcgcagcagcttcaaaaaattctcagagaagtcgtcacctcaccgaaaggaaccggccgaaggtttcaggacctgccgtatgagatagcaggcaaatcgggaacggcccagacgggaatgttcacaaaagataaacagacgctttaccacaaatggtttgcgggatactttcccgcggacaagccgaaatacgctctggtggtgctgcacatggacacgccgggggataaggctctgacaaatacagtgttttatgatattgttaaaaaggtacatgaaaatgaaataaatcagacatagaacaaccgctcagcccatgttaaaatatatgctgagcaagagggataaaggagtgcagaatgattgagcaataaacaatctcgttttgaaaaccgtgataagcgcagaaaagcaaatatggtgcttaacattttaattgctatcgtatctattcttattgtcgtcgttgccgtcagcctcttcatcaacagtccgtcgagcgacgtgagcgaaaaagcggacacgagccagaagcaggaaacacctgcatcaggcaagacgaagcagacatccgatgaagacataaaagacagcaaaaaagatacggcatcagacgatgacaaaaaagataaacaggataaggacacatctgattcatcttcagactctgacagcaaaaaagaagatgattcatcgaaaagtgatgacagcagcaaaaaagactctgattcaagcgatccttttaaaggcgcaaaaataacagagggcggctcatcaagcgatgtcgagaaaacaattgttaacccaaaatggaaagcggtcggcacaaagcaaacgggagaacatacggcgacgtatgactcaagctctgaagactggtccgaaatgcttgacgccatctcttacgcaacaggcgtgtcaaaagatcatatgacagtgctgtggctcggaaacaatggaagcccgcaagatgcgaaggggaaagttttagacaaaacgaacggcaaaaagtatcaggtcaccatcacttggaaagacaaaaaaggctggaagccgacaaaagtagaaaccttaaaataaccgcaaaaaagcagctgattattcagctgcttttttctgtcatacgtcagctgaaaaatgcaccgacgcgctgtaaaggattctgccgtcaacggccgtcacctgatgggatacggaacggacgcgaagcataatcgcctggttgttttcaatctgaacgtttattttcttttcaagctcctgcaaagatgccgcttcgaaaaattctactttatctttgattaaatccaattgaaaattcatcagtacagatcctcctgatttttcttctgagtcaatgaaagtataagcctttctgccgtaattgcgcaataatcccaaagtattttagtacccttccattcttttttgtgataggataggaactgttccacgattaatccatactatactcataggaattataaattatggagagtgaaaaatatgggccgtgaatttattcctttatttgaagattgggcagcgacttatgacgccacagtgcacggggctgacaaacaatatgccgctgtttttaaaggatatgacagcattcttgacagcattgtcgcactttcaggttcaaacgttttagagttcggaccgggaacggggaatttaacggcgaaattagccgccgcgaacaaaaaggtgtttggtgtagaaccgtctccgtcaatgagaaaactggcggctgacaagctttctgacaaagccgtgttcagtgacggagattttctggagtttcccgctccgccttttcaaatagataccatcgtcagctcgtacgcctttcatcatttaaccgatgaagaaaagcgaacggctgtaaagcagtatggcgcaatccttcagaagcatgataaaatagtgtttgccgatacagtctttaaagatcatgaagcttatgatgtagccattaaaaaagcaatccgaaacggctatcatcaattagcggacgatttaaagacggaacattatccgacactcgggacaatgaaaaacatcttttcagaagagggatttgccgcgcggtttacgcagcaaaatgactttgtctggataatggaggcgattaaacggtaaatcgaagggattgtgtataaatgaaactggcagtcatcggagcaatggaagaggaagttacgattttaagaagcaaactgaaagacgcaaaacaagagatgatcgctcactgtgagtttacaactggcagctatgaaggcgtcgaagtcatcttgctgaaatcaggtatcgggaaagtcaacgcggcgatcagcacgacgcttctgcttgaccgtttcaaacctgattatgtgattaacacaggctcagcgggcggttttcatcatacattgaatgtaggcgacgtcgtcatctcaacagatgtccgccatcatgacgtagatgtgacggcgtttgactatgaatacggacaggtgccgggtcttccggcagcatacaaagctgatgaaaagctgatcagtattactgaggaagcggtttctgaactgaacggcattcaagtcgccaaaggcacaatcgctacgggagattcttttatgaatgatccgaagcgggttgaagacgtacgcgccaaatttgcggatttgtacgcggttgaaatggaagctgcggctgtcgcacaggtgtgccaccagttcaaaacgccttttgttgtcatcagagctttatctgatattgccggaaaagaatctgacgtttcatttgataaatttttagaacaggctgccgttcattcaactgagcttgtcctgaatgtcatcaaacgaattcactaagcgggggattctcgttctcctccgcttttccaggaggaggacatatattgaacgtgataacagatattacagaactgatcggaaatacaccgctgctccgtctcaagcattttgatctaccggagggaacagcggtttatgctaagcttgagatgatgaatccgggcggaagcattaaagacaggctgggcgggatgctcattgaagatgcgcttcgcacgggaaaggtgaaaccgggcggcgttatcattgaggcgactgccggaaacaccgggatcggactcgctctgtgcgccagaaagcatcagcttcgcgccattttttgcgtcccggagcatttcagcagagaaaagcagcaaattatgaaagctctcggagcggacatcgtgcatacgccgagagaagaaggcatgcggggagccatccgaaaagcgcttgaactggagagagagattaataattcttatgccgttctgcaatttaaaaaccgagtaaatccattgacttactataaaacgatcggacccgaaatatggaacgcgctcggcggggatatccacgcttttgtcgcaggagcgggttccggcggcacctttgccggtacggcagcttatttaaaggagaaaaatcctgccgtcaaaacggtgatcgttgaaccggaaggctcgatcctgaacggaggagagccgcatgcccataaaacggaaggcatcggcatggagtttatcccggattatatggacgagaaccattttgacgccatttacacggtggaggacgatacggcgttttcgcttgtcagagaagcggccgagaaagaaggcctcttaatcggaagctcttcaggggcggctctttatgcagcgcttgaagaagcgaaaaaagcgcccgccggatcaaatatcgtcaccattttccctgacggcagcgatcgatatataagcaaaaacatttttcaaggaggtcagtaagatgaagaaaaaaacgctgatggtgcacggaggaattacgggagatgaaaaaacaggagcggtttccgtaccgatttatcaagtaagcacgtaccggcagccgaaagcgggcgagcacacgggttatgaatattcaagaacggccaatccgacgcggacggcgcttgaaagcttaattgcagagcttgaaggcggcgcggcgggatatgcgttcggctcaggcatggctgcgattactgccgtcatgatgctgtttgacagcggcgatcatgttattttgacggatgatgtatacggcggcacttaccgggtgatgacaggcgtgctgaaccgcttcggcattgaagcggactttgtcgatacgagcagtgaagaaaaagtcaaaaaggccattcgcccgaatacgaaagccatttatatcgaaacaccgacaaacccgctattgaaagtgactgacctcaaactgatgtctgacatcgcaaaagaagcgggcgtattgcttatcgtcgataatacgttttacacgccgtatttccagcagccgctcagcttcggcgctgacatcgtgctgcacagcgcgacaaaatatctcggcggccacagcgatgtcgtcggcggcttagtcgtcacggctgataaagaactgggcgaaaagcttcattatgtgcaaaactcaacaggcggcgttttaggaccgcaggattcatggcttttgatgagaggcattaaaacactgggactcagaatggatgccatcaatcacagcgccggaaaaatcgccgggctgcttgaagcgcatgatgccgttcagacgctttactatccgggatcagcgaaacatccgggccatgagctgacaaaagcgcaaagctccggtttcggcggaatgatttcctttgatgtcggcagcagcgaacgcgtcgacgcgtttttagaaaaattgaacctgtttacgatcgcggaaagtttaggagcggttgaaagcttaatctccgtgccgtccagaatgacgcacgcttcgatcccgcgcgaccgccggcttgcgcttggcattaccgacgggctcgtgcggatctcagtcggtattgaggatactgaggatttaacggcggatgtgaaacaggcgcttgattcacttttataaagaatggatagatttacattctctgtcggctgtcagcttgtattataatgttggtagactataaaactggcaggtgaccttatatggagaagaaaagactgaaatcattaatagaagattttaagcattacgcatttattctgcttgcagtcagcaccttcatttatatcggcgcggttcttcccggacaagggctgactgcgggccagaaaatgctgatgtttgtaacggattgtgtatttttagcgggcgcttatttctgcgttgaccgttcacttatttataaaaagaggctggaagaggccgaagaataaaaaaaagccattgtcttttgacaatggctttttcgtttcttattcagacggggtttcgcgtaattcttttcccattccttttaaaaactgcagcccgaagccgagcgcgcggttaatatcaggatcaccgagggctttcatcagttcaaacatactgactttcctgtcctcttttaaaaatctttgcgcctgatccgtcccggccatggcgctttctaaaagtctgcccataaattcgggatcagcttttgacagcgcgcctcccgcggccatcatcgtattcaggagattggtgacaggttcccgggaaatctgtccgagtgcgattttggcaatctcctcttttgcctggagcatatagccggcggcatcaaaaatgcccaagctattcagctctgccatgatggacatcgttttcgcgacggcttcttcattttctgcgagaagcgtcttcagctcttccagtttttcagctttcagctgttcctctgttttcgtttctttttgaatttcagtaattgggcttgccataatgtttcctcctttccttaatcagttaagtgcacatagcccggacggttccattttcgctgagcttccacaccgttttgcggatgacgttttttgttccgcggattcgttttcggaagcggcggagtatcacaggaaccaagcacttccatgcggacttttgtctgcttataggcaggtgtatgtgtccgtgaatcatacgcaggcccggtcaggaaattaatcgcagaatctttatctgtagagttcatcggcagataaagctcatttgcgcggacgcggtctgtcacaagcgcgttcaatttaaccgccccaaaaggagagacgagccggatcattgtcccatcgcaaattccgcgttcagccgcgagctccggcgatacttcaacaaatacatccggaactttagactgaatgccttttgacttgtttgtcatgtttccttcgtggaaatgttcaagcatccgtccgttgttaatatgcaggtcatattcttcagggaatacagcaggctccacccaatcgctcagcgcaaaacgggcttttttgtccgggaagttaaagccgtcttcataaagaagcggagtgctttctcccgtaaagcttccccataggaagctgttccagccgctaagaacgtcgtagcttgcttttccgaacagcggagaaaggctcgccatttctgagaaaatgtcgctaggatgcgtgtaattccaatcagcgcctaaacgattggcgacttcctgaataatccaccagtcgggttttgcatcgccgagtgtcggaagcgcctgatacaatctttgcacacgccgctctgtgtttgtaaatgttccgtctttttcaagagatggaaccgcaggcaggatgacatccgcgtattgcgccgttcttgaaaggaaaatatcctgcacaacaaagaaatctaggctggataaaatgtcatgaacatggttggcgtttgaatcaacgagcgccatatcttcaccgacgagatacatggctttcatgtttccttcttcaatcgcatggagcatttcgatattatcaagacccggcttgccgtcaatttcaacaccgtaagctttttcgaatttagcgcgtgccgcatcatcggtaatatgctgataccccggaagccagcctggaagagttcccatatcgcaagcgccttgaacgttgttatgtccccgcagcggataggctccggcgcccggacggcggtagtttcctgtggcaagcagcaggttggaaatcgccgctgatgtatcagagccgcctgtattttgagtaacgcccatgccccaaagaacacaagtaccgtctgcatcacgaatcatttcggcaatgcggatgatcgtatcctgagaaagtccggtgatgcgctccgcatattccaatgtgtatttttccagcgtttctttataatcatcaaagtagttgacattttcatcaataaacgcttgatcgtgccagccttggtcaatcatatatttcgttactgccatgagccagacctggtcagttccttgtttcgggctgataaagaggtcggaccgttcagccatttcatttctgcgcagatcggcaacaatcagtttttggccgtgcagcttatgggcgcgtttcacgcgtgtggccagaaccggatgtccttccgccggattggcgccgacgatgagcacgaggcccgcttttgcgatatctttaattgtgccggcgtctccgcccataccgacggtgcggaataagccgtccgttgccggtgactggcagtagcgtgagcagttatccacgttgttggtttcaaatacttggcgtgccaatttttggatgacatagttgtcttcattcgtaattttagaagaagaaataaaaccgacagaaccatttccgtgttcggccttgatcgaaccgagtcttgaagcgacaagatcaagagcttcttcccatgacgattcaacaaatgcgccgtttttccggataagcggttttgtaatccgttcttccgaattcacgaagtcccagccgaatttccctttcacacatgtggaaatcgcgttaaccggagcatcggaaacaggctgaattttaaggatgtcacgtccttttgtccatacttcaaaagagcatccgacgccgcagaacgtgcagactgtttttgtttttttcgtccgtttatcgcgcatagccgcttccacttcagacacggcgaagatgcttgtatagtcgggttcaacatttttcactaaatcaatcatcggttccatgacatcttcttttattcctgtcataaatccggcttggccgatcattgatttttccatcagtgcgttacaaggacagacagtgacacactggccgcagctgacgcaggaagattcattaatggcgacgccttcatcccaaatgacccgcgggcggtcgcgctcccaatcaattgaaagggtctcattcacctgaaggttttgacacacttccacacattggccgcaggcgatgcattggttcggatcatagcggtaaaacgggtgagacatatcaaccgcgcactttgaatcatctttcggcgtatacggatatttctgatgctcaatccccatcatttccgctgtattatggagtgtgcaattgccgttgttgttatcgcataccgtacagtaaagcaggtgattctcgagcaggcggtccatggcctctgtctgagcctcttttacccttcccgacgtaagcgagatggacatcccgttttctgcagccgtggaacaagagcgctgcaatttcccgtttacttcaacaatacaggtgtcacatgtttgaatcggatccacttccggtacatggcaaatttgcggaatctcaattccgttttggtttaaaatatctaaaatcttagacccctctggtgcttcatactccgtgccgtcaattttgacacggatagactgaacgtctgtcacttccaattcccctccatcttttaaactcgaaaaaagccatgcacatagataccggcctcctgtccggagaacggtataaatacgcatggcggaatagttcactagcaagtcttactaacagaccaatcctatttgtataaaacgatagactcataacacgtttcctattacaaatccatcttcactgcttttattataaggtgatatttattataatacaatacgaaaggaaaactttaaccaagtgaaatgtcacaaaggggaaccgggaatgtctttcataggctaaaatcggaggggacaatatgtctaaaaaaattcatgaatttaacgatattatccggaaattgcgcaaagaattatttggaaaggggcctgaacgaattcacaccgtttttgtggataacatggcggtatctacactttacggcaatctaagcgcaagtgagcagtttatcgcacgcacgcctgaaggaagagaaatggttcatgcggcgcgaaccagcttaattcaggagctgtattcaaaacaaacgcctgacggaatggaagagctcatcggagcaaagcttgtgcatctgttttcagatattaaaatagaggaaaatattgctgtatcggtgtttgtctttgaccgctcaattgaagagcataaagaagaaatcaaaagctgacaatattcaattgacacgaaattgtcacatttgatatgatatgaactgccagcagtggcctaaggacgattttttatggaatgtgtgcatgatctgtacatattctataccgcatattttcattctgcttgatattgttgtatgggtatgcatacaagttaggcagcattcaaaccccgttttttcagacgggttagttgaatgctgccttttttgttaggcgtctttggaaactgcgggctgaaatgataaatggaggggttattatggcttttcgtaaaccggacgaaatagcggagcttgcggtcgaatcaggggtaaaaaaggtgcattcaccgctttcagcactgattgtattaggatttttgggaggagcgtttatcgcactcggttatttgcttgatatccgtgtcatcggcgaccttccgaaagaatggggaagcctgtcgagtttaatcggggcgtccgtgtttcccatcggattggtgctcgtcgttcttgccggcgcggagctgattacgggaaatatgatgtcggtatccatggcgctgttttccagaagaatatccgccggtgcattggtgaaaaattgggtgatcgtgacgttgatgaatcttgtcggcgcactgtttgtcgcttactttttcggacatgttgtcggattaaccgaaacaggaccttacttggaaaaaacaattgcggtcgcacaaggcaaattggatatgccgtttggaaaagtcattgtttcggcgatcggctgtaactggcttgtctgtttggccgtctggctttctttcggcgcagaagacggagccggaaaaatcgcgggtatatggtttcctattatggcgtttgtcgcaattggttttcagcacgttgtagccaatatgtttatcatcccggctgcgatatttgcaggctctttttcgtggggtgatctgattggcaatctcattccggcctttatcggcaatgtcatcggcggggcagtgtttgtcggccttatttattttattgcatattcaaaaaaagatcagaaaaagcaagggatgaaaagagtttcctgaggtaagaaagatgccggaaaacacggacaattgaagcggaatgccagcacattttccgtccaaatcttgaaaaaaatgtttacaaaatggaagctgatggatatacttacaaagtaagaaaaaagcaaagggaggttgaatcacatgacgacgttaaacggcaatcaaaatctacaattgaaccgattcagcctgtggaagagttcgtgtccttccttaacctctgcctgtcaagcacgttaatttcggagtatcaggacattcgcagctccccgcagggaaagaagcacagtcttcttttgtctgcggatttagtctgcccgcagcgcatatgaactttgctgcgggttattttcgcttgtgcggatattgaaagggggtgagcgataatgaccattaatcttttctttttaacactgaccatttcaaagcgttttaaaagtgcggaagagtatgaacgagaacagcaggtcgaagagttttataatgaagcgaaagaacgccagctgaaacacttttatatgaactaacggacacgaagggccaaaacggaggagaaggaggagattatcatgttcagaattgaactgctgaatcattacacaatggagaaggaccaggtttagcgaggatgttgctgtcacgtcgcagacggcctgcataccatggtaaagaaagaaaaattggtaagcgggtgatagcatgcaaggcggtcagaacagaattccatccatcgggcacgggtatgcgtcaatgccccattcatttaagcacggctacggcaacccgtatcgccggcagagaatggcggcgctttcccggcagacaagatatatagcaccgtattattggtactagagcaggcggaaaacctacgttttccgtcttttttttatgaaaacaaatataaatttcaaataaatcgaaacgttcatgaagagaagtgcgtctagttagtacctcatactaatacgaggtaatattatttctgaataataaatcacaggaatggaaaagcgggtgttatacaatgttgcaacatacatcttcagcattaaaacgaatgcgcgcgaaatactttgctgcatcagaaccggcagagtcagtcattcagcaaatcttgatggacatacaggaatacgaccgcattttggaaatcgggaccggaaacggctcaatgtttaaacaaatcatcagacagcttgaaaagggcagtcttaaaagcatagaaacatcgaaacgtaaaatacggaaaacacagcgcgcaaaccgttcggttataaaagccgggctcggaaacattcagcaggggaggccggaaagcataccgttccgcgaccgcagctttcataaagtcttctcattacatactgctgaaacagtcagcgattaccggacggcatgtaaagaagtgtaccgcgttcttcaaattgacgggtgtttctatatggttttgaaaccttcgcggatgagtgaaaaggatgtgattgaggtgctctatgatcagcatttcagagacatttcagttgtcagcagagattcattccattttattactgccattaaatagaatatttcttgggaaataaaaagagctgcttaagtcactgcagctctttttgtgaaattgggcatatttccttatttttggttatttcacatatattttatattaaaaaaagtttttttcttatacaatggtaatcagatgaccgtacattttaaatattttgaacaaacggaatgaatattcattccgcgtttagaaagggggatgaaatgacagcttcaaataaggttgaactcattatgaaagcgtcgcttactttgtttacagatagaggatttgacgccacgacgattccgatgattgccgctcaggccgatgtcggaaccggcacaatttaccgttactttgacagtaaagagacacttgtgaacgtactgtatcaggaaagtgcgcagcgttttatgaaaaaagtcaaaacggactttcaggggatatctgtaagagaagggtttcatcacctgttttattgtctgattgattttacgaaggaaagtgagtatgcattgttttttcttgaaacgaataaggacgcctactttctgaatgaaacgagccgtaagcttcttgatgaaataacacagatgcttgacgtcttttttcagcgcggcaagtctgaaggcgtgctccgcaatctgccgtccaatgtgctgatagcgctgctgctcggggcatatctcaaactctatcagcttgtccggacgggaagcgtcgaaataacaaaaccgtttctgaaagaattggaacaatgttcttgggatgccatcagaactcattaattattcgccgaaggaaggaagatcgatatgaaacagctaagcgctataccgcagccgaaaacatacggacctctgaaaaatctccctcacttggaaaaagaaaaactgtcacaatcgctctggaaaattgccgaagaatacggcccgatctttcgttttgaatttccgagctctgtcggggtcttcgtatcaggccgcgagctcgcggcagaagtctgtgatgaaaagcgatttgacaaaaatctcagcaaagccctgctgaaagtccgtgagtttggcggtgacggactatttacgagctggactcacgaaaagaattggcagaaagcgcatcggattttattgccgagcttcagccagaaggcgatgaaaggctatcattcaatgatgctggatattgccatgcagctcgtgcagaagtggagcagattaaatccgaatgaagaaattgatgttgccgaagatatgacgcgcctgacgctggatacaatcggcctgtgcggatttcattaccgctttaacagcttttaccgcgacacacagcatccttttatcacaagtatgcttcgtgcgctgcaggaggcaatgcgccaatcacaaagacacagcctgcaggacaagctgatgatcaaaacgagacatcagttccagcaggatattgaagagatgaattcgcttgtagaccggatcatcgctgaacggagggaaaatccggatgagaatctgtctgaccttttagcattgatgcttgaagcgaaagaccccgtaacgggggaaaggctggatgatgaaaatatccgttatcaaatcattacctttttgatcgctgggcatgaaaccacaagcgggctgctttcttttgcgatatactgcctgctgaaaaataaagataaattgaaaaaagccgttcaggaagccgagcgggtgctgacgggagagacccctgaatataagcagattcagcagctgacatatatccgcatggtgctaaacgagactttgcggctgtatccgactgccccggcattttctctgtacgcgaaagaagatacggttctcggcgggaaatatccgattgcgaagggacagccggtgacgattctgactccgcagctgcaccgggataaaagcgcatggggagaagatgccgagtcattccgtccggaaaggttcagtgatcccgcggcaatcccggcagatgcgtataagccgttcggaaacggacagcgcgcatgcatcgggatgcagtttgccctgcaggaagcgacaatggtgctcggccttgtcctgaaacattttgaactgattgatcatactgattatgagcttacgattaaagaagctctaaccattaagcccggtgattttaaaatccgtgtgaaaaacaaggacgtgtccaatcatcagcccgtacaaaaccataaagctgaaggcagcggtcacaaagaagaaacgaaagaaatcccgtcccacggaacgccgcttctcattctttacggttcaaatttgggaactgcggaaggaatcgcggaagagctggctgatatcggaagaagcaaaggattttcaactgaaaccggcccgctcgatgattatgccgggaaactgcctgtaaaaggcgcggtcgttattgttacggcttcttataacggggcgccgcctgataatgcagcgggttttgtgaaatggatggaaacccttgaagatcaggaattaaagggtgtttcttacgccgtcttcggctgcggagaccgcaactgggccgccacttaccaaaggatcccccgcctgatagacaaagtgcttgaagaaaaaggggcaaaacggctgacctctatcggggagggcgacaatgccgatgattttgagtacagtcaggaagcctgggaagactcattctggaaggacatcatgaaggcttttcatatagaggccgctccaaaacagacaaacaaatcacagttatcaatcgaatacgtaagtgaagcagccgagacgccgattgccaaaacgtacaaagcatttgaggcggaggtcatcacgaacaaagagcttcataccgaaagcagcaagcgctcagtccggcatattgagctgcgtctccccgaaacagaaacgtatcaggaaggagatcatctcggggtgcttccgcaaaacagcggggaactgatcagccgtgtcattcgccgattcggtcttgatccgaaccagcactttaagatcaagggccggcagctgcctcatctgccgatggaccggccggttaatgcgccggagcttttggcgtcctatgtagagctgcaggagccggcaacgagagcccagcttcgcgaacttgccgcacataccgtgtgcccgccgcaccaaaaagaattggagcatctttattctgatgatgcggcatataaagaaaacgtgctgaaaaaacgaatgaccatgctggacctgctggaagattatcctgcatgtgaactgccgtttgagcgctttttagaacttctgccgtccttaaaggcgcgctattattcaatctcaagctcaccgaaggcaaccagcggggagctcagtatcacggtcggcgttgtgacggctccggcatggagcggccgtggggaataccggggcgtggcttcgaactatttagccggattacaaaaaggcgattctgccgtctgtttcatccgctcgccgcagtcgggtttcgcattgcctgaaaatccgaaaacgcctctcattatggtcggagcaggcacaggaattgcgccgttcaggggatttatccaggcgcgggctgccgaaaaaatgtccggtaacagcctgggtgaagctcatttatacttcggctgccggcatcctgaagaagacgatctgtacaaagatgaattcgaccatgcggagaaaaacggccttgtcaccgtgcatcgggcgtattccaggttagatcaggactgtaaagtatatgtacaggatgttctgcttcgcgaggctgcacaaattattgcccttcttgaccaaggcggccatctctatatatgcggtgacggaagcaaaatggctccggctgtcgaaaatgtactgcttcaggcgtatgaaaaggtgcataacaccgattcaaaagtttccttggagtggcttgaacagctgcaggcggaaggaagatatgcgaaagatgtttgggcaggtatgtaacagaagagtgagacaactgaagaatgttttttaattgaagaaagccggcacgatatttgaaatctactgaatcaaaaggaatagttatagggagtatcgtgccggccttatctttagtatcggacaaaaggcacaaatctttaatgtttttattgatttacatgcaggcggctatgtcccttttttctgaattccgccagaaataaaaccggataagacagcaatagcaaaaccgaaataaatgaaatgataccgatccaatgaaaatgcgtccaaaagaaaccgccgcaagacccggccacgcttgaaccgatatagtatgcaagcagatataatgaagaggcttgcgcgcgctgatcaccggctgcgcggccgacccaggcgcttgcgatcgaatgagcgccgaaaaagccgaaggtaaagacggcaatccccgcgattttgagcgcaagctggggcaaaagtgtcaccgctgcgccggcaagcataacaaaaatcgcaatcttaatcatttttccgcttccgaaaagatctgcttttttccccatatagaccgagctgaacgttcccgcgagatagacaataaaaataaaaccgatcacagtctgcgacaaatgataaggagccgccattaaatgaaagccgatataattatataatgtcacaaaactccccattaatataaatcccagagatattaacaaaagcagccgtttgcggtgcaggaccgctccgtattccttacatgccgtttttacgcccgcatgccgctgagatgaatggcgcggagccggaagaaaacgccaaaacaaatagcttaatacaatagaaagaatgccgatgatggcaagcgccggccgccagccgaatacatcggtcagaagccccgttaacagcctgccgctcattcccccgatgcttgtgccgctgatatacaagcccatcattttcccgaggcccttcggatcaaactcctcgcctacatatgtcatagcgacagccggaactcctgccaggaaaataccgagcagcgccctcattgccaaaagcgcgggaaaagccggactgaacgctgttaatagacctaaaacagaagtagctgttaacgacagcaccattaatttttttctgccgaatccgtcagacaacgaagcggcggccaataatgaaaatgccaaaacggctgttgagatggataaagttaagctggcagccgcagcggaaatatgaaactcttccgaaaacaaaggcataagcggctgtgtcgtgtaaagcgtggcgaaggtcacaaagccgctgataaacagagccaagctggcctttctgtaagcctttgtatgaggctgaataaacgtcatgaatgtccctcttttctcactgttggttatatatgtatcgtacgcttttcatttcaatgtgtctaatttataataactatagaattaatgcgtgtaggttatgaagaaaggggagaaggagaaaatggagcttcatcaaattgacaacttcattgcggcggcagctcatcagcatttcacaaatgcggcaaaagaaagaatgatttctcagccggcattaagccgatcgattatcaggctcgaagaagaattaggcgcgccgttattttacagagagacaaaagccgtccggctgacaagacacggagagcagttcttaataaaagcaaaacaagcgagaagagctttaaatgaaggcgttgaacaagtgaaaaagaatatgagcctggagcacggcgaaatatctgtatcatttcttcatacactcgggctgcgcttaatgcctcagctgattgccgaatttaaaaagctatacccaaacgtgaccttccggctttatcaaggcgcaaatgaaacgcttcgcaaaatggtggaaacgggagatgcggatatctgtctcagctctccgccgcttcccagcgagcttttacaatggacagtgctggagaaagagcctctttatgcggtgctacctgagaaccacccgcttgcaggaaataaaagcattcaaatgaaagagatgcaggacgaggattttgtgggttttaaaccgggatacgggctgaggtatatgtttgatctgatgtgccgggatttgaatatacacccgcatctcgcatttgaaggagaggaagtgtcaaccatattaggactgaccgccgcgggtctgggggctgcagtgctgccgaaaaccgcggagcattcatactttccggtcgtttttcttccggttgcagattaccaatgcgaacgcaccatagcgttagcccagctgaaaaaccatgctctctctcccgctgctgagcgttttaaacagtttgcacttgagtattacaaagcacgcaactgagcggtcattttattaaaatcaaagttgaaaataaagcagaaagaaatacagaaaacggaggaaaaccatggcgaaaaaaacagtgaaaacaaatgctgtccgtatcattgagcagcaaaacattccctatgagctattaggttacaaaacagaagggggacagcccgcagacggtctttccgtttcacaaaaaatcggatacgctgccgaatatgtttataaaaccttagtggcatctgcaggaactgatcattattacgtctttgtcgttcccgttgcaaaagaactgaatctgaaaaaggctgcgaaggcggcaggtgagaagaaaatagaaatgattgccatgaaggaccttttgggagtgaccggctatatacgcggcggctgctctccgatcggaatgaaaaaaaggtttccgacttttattgatagatccgctgaaacactggagtttatgattgtcagtgcggggaaaatcggaatgcagctgaaagcagcgcctcgagatttagccgaagcaagcggggcggtatttacagacattgtataaatgtccggtgaatctaatggaatacacgtttcaagggagaatgataatgaaaaaaagatatgaaaacttgaatggcgtgaagaatgaacatggattcagggacatgtggaaatggatgaaagaacgaagagaaaaaagtaaagacttaagcgagaacattccgaaagcggtcacaagggatgtccgtgatgttgccgtcaatcggacggaaaccgccataacatggatcggccattcttcatttctgatccaaatacaggggtttaacataatgaccgaccctgtatgggcgcggaggatgggttttcaaaaacggctgacagagccgggatatgaattgagcgaactgcctgacattgatgccgtgctcatctcacatgggcattatgaccatcttgattttccgagtataaaaaaactgagaggaaacccggatttttacgtgcctgcgggactgaaaaagctgttcaacaaaaaagaccgcaaaaaggtccatgaaatgaattggtgggatcgttttgagatgcggggggtgaacatatcatttgttccggcccagcactggacacggagaacgctttgggataccgatacctctcattggggaggctgggtcatagaaagcaaaaacggcgagtccatctattttgcaggagatacaggctattttgaaggctttaaagaaatcggagagaggtttcgtattaaggcggctctgatgccgatcggagcatacgaaccggaatggtttatgcaagtgtcacatatcaatccggaagacgccgtgaaagcgtttttggagctgaaggctgacagcttcattcccatgcattacggggcattccggcttgctgatgatacaggcccggaagcactaagcagactgcacggcgagtgggatcggcttgcattacctcctgaaaacctgaaagcattagcgcttggcgaaacattttggctgtaacagcaggttttcgctgccgacaccaatcgtttaaaaacggttggtgttttgttgtcaaccaaaggtgaacagctttagtataaaacatgatttttccggaatctgcggtaaaaaacaaaactttttactcttttgtttcattataaaatgaaaacggtttcgtatgcgcagtatatttaacctatcacaattgctccagcagaaacggacaggaaggatagaaaaacagatgaaatacatgaattcaaggcagaaaaagattttgtatctgttgttatctgaacctgatgactacttagttgtgcaagatttcgcagacagggtccgctgttctgaaaaaacgatcaggaatgatttgaaaacgattgaagatttcctgaatgaacatgctcaagctcagctgatccgcaaaccgggattaggcgtctatttacatatatctgaacaggaaaggtcacggttaatccggcaaatttataatgagcactttacgtgcaggcacaagaccgatgaagaaagaatacttcacatcgcttatgatttattaatgaattcaaagcccgtttccgcaaaagaaattgccgcacagcattttgtaaacagagcttccattaaaaaggatgtaagtgcggttgaagagtggctgaagcgatttgatctcacgctggtttctaaacagcggctcggcttaaagattgaaggggacgaaaaaaacaaaagaaaagcattggcgcgaatttcagatttgattgataatgcggaatttacaagccaatttataaaaagtaagtttttaagttatgaagcggactttgtgagaaaagaaatcaagttattacaaaaaaaacattctatctattttacggatgaaacatttgaaagtttgctgctgcatacattgctgactatccgccgtatcaaaatgaaacagccggtcgccatttctgcaagacagctggacgcggtaaaaaagaagaaagaatatgaatggacactggcttgtttaaaacggcttgagccggtatttgccatccggtttcctgaggaagaagccgtctatttaactttacatataataggcgggaaagtccgctatccatcgcagcaagaaaagaagcttgatcttgaagattctgagctttccaaagtcgtcaggcatttgatcaatcgtgtttcagaactgcaaatgctggatttttataaagaccaggaactgatcaacggattgaacattcatctcgatccggtgttgaagcggctgagctatgatctctctgtttcaaaccccatgcttcacgacatcaagaaaatgtacccttatttgtttcatcttatcatagacgttttagaagacatcaatcaaacatttgatctttatattcctgaagaagaggcggcctatttgacgctgcattttcaggcagcgatcgaacggctgcgccgaaacagtcataaccctaaaaggacgatcatcgtctgccatatgggcattggcatgtcgcaattgctgcggactaaaattgaacgcaaatttcatcacattacggtaaaagactgtatcgcaaaagcggagctgacagagtatatcaaaaagcataaagatatagatttcgtcatttctacgatagggcttggaaatgtaacgatccctcatattgtcgtatcaccgcttttggagtctgctgatgaaaagaagctcagcgcatttctgcaacagcttgatacatcacaccgccgggagcaaaaaacgtttaaaatgctgaacgatacgactccgtttctcgtttttttacagcaagagacagagcaccgttatcaggtcattgaaaagctggcgcaggctttgtatgaaaaaggctatgtagaaaaagagtatggcattcatgcagtaatgagagaaaaaatgtcggcgacaaatatcggggcgggtattgccatccctcacgcgaactctaaatatatcaaacaatcagccattgcaatcgccaccttaaaagagccgattgaatgggggacagaaaaggtgtcgctcgtttttatgcttgccgttaaacacgaagatcaaaacaaggtaaagcaattattcagtgagctttcctatcttagcgagcagccggtatttattcaaaaactgacggaagaaaaaaatgtgatgacgtttttatcgtatttaaactattaaaagcagggaatatctccctgctttttttctgtttatagggaaaaatgccgttatttccggaacttatggtaaaaaaacgcgcttatcacaggctgatttcagtataaagttgagacaagatcttgaaattcagactgcaaaggaggatttatatgaaactgttagcgattacatcatgtccgaacggcattgcccatacgtatatggctgctgaaaatttacaaaaagcagccggcagattaggcgttgagatcaaagtggaaacccaaggcggaatcggggtggaaaataggctgaccgaagaggaaatccgggaagcagacgcaatcattatcgcggcggaccgctcggtgaacaaagaccgattcgcgggaaaaaagctgctggccgtcggggttcaggaaggcatccgcaaaccggaagaattaattcaaaaagcgcttagcggtgaagtgccggtctatcaatctgcttcaaaagctgaatccgcaagtcagcagggcaaaaaacaaaacccgatttaccgtcatttaatgaacggcgtttcttttatggttcctttcattgtcgtcggcggattattgatagcggttgcattgacgcttggaggagaaaaaacaccaaaggggttagtcattccggacgagtctttttggaaaacgattgaacagatcggcagtgcttctttttcattcatgatcccgattttagccgggtacatcgcgttcagcatcgctgataagccgggtcttgtccccggaatgatcggcggatatattgcggcatccggcagcttttacgacagtgcaagcggcgcaggatttcttggaggaatcattgcgggatttttggcgggatatgcggcgcttggaatcaaaaaatgtaaagttcctaaagcaatacagccgattatgccgattattattattccggtgtttgcctcactgatcgtcggtttggcgtttgtctttctgatcggcgcccccgtcgctcatattttcgcatcattaacggtttggcttgcgggaatgaaaggttcgagctcaattcttctggcattgattttaggagcgatgatctcctttgatatgggaggacccgtaaacaaggtggcctttcttttcggatcggcaatgatcggagaaggaaattatgaaatcatgggcccgattgccgtttccatttgtataccgccgatagggcttgggattgcaacgtttttaggaaaaagaaaattcgccgccgcagaaagagaaatgggaaaagcatcatttacgatgggccttttcggtatcacggaaggagccattccatttgcggcccaagacccccttcgtgtgatcccgagtattatggcgggttctatgaccggatcggtgatagcgatgatcggccatgtgggggacagagtggcacacggcggccccatcgttgctgtacttggagcagtagatcatgtactgatgttttttatcgctgtaacagcaggctctcttgtcaccgctctgttggttaatgtactgaagaaagatatggcgaaatcccccgcgcccggcgaggtgctgccgtctgccgcaccaaatgaagctgcagcggcaaaagaaacaaaggaaccatctcaggctgacagccgaaaagccgggatgaccgaaatcaaaaaactgactgacattatcagtacggacttgattgaaccgcatttatccggcgaaacgagggatgacattgtcgacgaaatgatcgagaaaatgtcccgtaaaggtatgctgctgtctgacagcggatttaagcaggccattttgagccgggaacagcagggaaccacggcgataggtatgaatatcgccattccgcacggaaagtctgaagccgtcaaaacgccgggtgtcgcattcggaataagacgctcgggtgttgactggaacagccttgatggttctgatgcaaaactgatttttatgattgccgtaccgaaggaaagcggcggaaatcagcatctgaaaatattgcagatgttatcccgaaaactgatggatgacagctatcgggaaaggctgctctccgttcagacaaaagaagaggcgtatgagcttctggaagaaatcgaataaagcgggggatgatcatgtctactgaaccgatatttttcaatccggttttcaaagaaagaatttggggaggcgccgccctgcgtgattttcactataatattccgtccgagcggacaggggagtgctgggccttcgccgctcatcaaaatggacagagcacagttcaaaacggcatgtataaaggatgtacgctcggtgaattgtgggagcatcacagagatttattcggaaaccttgaaggagaccgttttcctcttcttacaaaaattttggacgcggaccaagacctgtccgttcaggtgcatccgaatgatgactttgccaaaatgcatgaaaacggggaacttggaaaaaccgaatgctggtatatcattgattgtgcaaaagatgcggagatcattttcggccacaacgcaacaacaaaagaagaactgatatccatgattgagcgcggagaatggggcgggctcctgaacagagttaaggtaaagccgggagatttcttctttgtcccaagcggcaccgttcacgcgattggaaagggcacacttattttagagacgcagcaaaattcagatacgacttacagattgtatgattacggaagaaaagatgcggacggcaggctgcgcgagctccatttggaaaaaagtatagaagtgatagacgttccatctgtccgtgaacggccgaccgttcaatataaacaaacagatgatctgctggcagctgttttaatagaatgtccttatttttcagtcgaaaagtgggttgtaaaaggtgaagcaaatctattccagcatcatcccttccttcttgtcagcgtgatcgaaggagacggaataatgagtgcaggcggacatgaatatccctttagaaaaggagatcatattctcctgccttccggtttgggagaatataaactggcaggccatgcaaattgtattgtgtctcatctgtgatcctcaaaacccttctctagcatcagagaagggttttttattatttttacaaaaaggacggaatttccagtgtatcagtgtttttgttcctgaatttattctctcaatttgtatatctcccgagccattgattcaagtatgtacatagcggggatttgggtggtgacattcgcattttcaacccattcttccgtcacgtaatatgaaatattcacatcggacattttggcaatggttgaatgtttatgatttgtaatactgatgacccggctgccttcttgtttcagctgattcagatgagtcaccgtagaatctccttcacctgaaaccgataatgcgattgttatgctgttatggcggaaatgggaatgggccggaaagtaaggatctttaatatacattgaaagtttccctaagcacgaaaaatatctggctccgtattcggcgagaattcctgaacttcccactccgataaaaataacgctttctgcatcggccgcaagggctgctgcttccttcagcttttcttccatccctccgcttactgttctttcaaaaaactcggcaacggaatgatggggactctttaaaatcgtttttttatttgcctccgtatacattttcagcttcaccttaaactccgaaaacccttcacagtttatttttttgcagaaacgtaaaatagaagccgtagatacatgggtttcatttgccaattcacggattcgcatatagacgactttctcgctgttttgggagatgtagttgtataaagaagtttcaagctcgttaaatgaagcaatcatttcgtgtgtgaacatgcagggggattctcctttttatgagaatggtgaatgtacatctaatcgtaacatatcatttttaaaagaaacatagtgttatatttatgtgacaaatcactttttgtgtcattcaaaacaagacgtcagccaatgatttacggcgcaaaacaactgcggatataattcgttcatacgctttatgcatgatctcttcaagggtctctgacaaaagcggccgaaaaaaggaggacaatatgagtatcaaactgatagcggttgatatggacggaacgtttttgaatgatgaaatggcatataacaaagagcgttttatgaatcagtatcgtgaattaaaatcgcgggggattaaatttgccgtagcaagcggaaaccagtatgcgcagcttacatccttctttccggaaatcaaaagtgaaatcgctttcgttgccgagaatggcgctttcgtcgtgaatgccggagaagaattattcgcgggcaggatgtctgaagacactataaatgcagtgatccgtgctttagagcagtatgaggtgaaaaacgtcattgcctgcggaaaaaaaagcgcgtatattcatgaaaatgccggtgaagatgaatatctgcatgccagtaagtattattatgtgttaaaaagggtgccgcattttgaaaacatcgatgatgacattttaaaattttccatcagctttcccgccgaacattgttccgcacttctgagctatttgaaaaacgccatcgggtctttcgtcacgcctgtatcaagcgggcacggtgacatagatctgatcataccggggcttcataaagcaagcgggattaagctcctccagaaacaatgggggatgggtgatgaagagtgtgcggccttcggagacagcggcaatgatctggagatggtgtccgccgtgaaatacggggtcgccatggataatgcgcaggaaagcattaaacaggctgccgcgcatatcacgcaatcaaacaatgaagaaggggtcttaaatgcgattgattccatcctcaaatgtgaaaaaccctttgtctgaaaaagacgttttaactgcggaggtgctgaacggtgattaaattagtgattacggatttagacggtacatttttaaataatcaaggcgattttgacagaacgttatttgaaaaaacaaaacgagtaatggaggaacagcatgtcgctttcgccatctgcaccgggaagcagtgtgaaagggtggaagctttattcggagaagatgcgaaagatttttggattttaggagacagtgccgcacgtataaaaaagaacggcaaattcgtatatgaatctttgatcagcaatgaagcgggactgtcaattataggcgctttagaaaaaatcagctgcgggcatagcattatcgcatgcacaaaaaatggcgcgatcgtaaaagaaaatctgtctgaaagtgaaatgaaatatgtaaatgcctcttatgcacatgtaacgaaaataactgattttactgagataaaagacgattttatcaagattacggttcatgaccccgacgccaactgtccggaaacgagagaaaagctgcatgaattttttcaccaattatatatcgtagcatcagaggatacctggatggacatatcaaatatcggaatacataaaggatcaacagtacaagaactgcagcgattattaggggtttcggctgatgaaacaatggcgttcggagacggccgcaatgacaaagaattgatggaagcggcatcctacagctttgcggttaagaatgccattgacgaaataaaagatgcggcgcactttgtcatcaaatcaaatgaggaaagcagcgtcatgcacacgattatgagaatattagcgctgcaaaaacaatgatgggctaaaatcaatgcggcatgacttactagggatagaaaaagcgggctatcctcagactttaattcactcctgattttcctaaagtatgttaaaaatgaataaatatctatatttgactcgatggtattggtataatatgtataaaatgaatgaagcggtgtaatatcaagatgaaaaaaatcacttcatatcagacaaaaagtaggaactgcctcgttttgaaattgggaggtgtttgtattagcccgctgttgagccccgcgtatatcattcttatttttcttccggcagcttcttttctgttagggattttaggatatttcattttcaaaaaagtatggatgatggttgctattgtattcattttgtccttgatatttatgtttattgtaataggtgccgagccgacatttttcatttgggtggctatgatgacggggagctgttttgtctccggttcaatcactaagacgatatggacttttgcaaagagaaaatattagacagaagaatcctgtttgaacagctatcctttttttgtcgattgaagaaaaagaagtatagaggtatccgttatgttcttatattttgtctgttgttgtcagttcgggctttctgttaaaaatgtctgtctatcgttttgttcttttttaactaaacggagcactataattgaactgcagatatatagataaacaaaaaaggataaggaggatttttatgtttcaaactttagaccattttttgaaatcttgggaattcgaagccgatgcgacacaaaaactgctgaatcatctgactgatgaatcacttaaacaagaaatcacttcagaacattggactttaggccgtattgcttggcatactgtcgctgccattcacatcattacctcaaacacagatttaacgtttcacgctccggccgaagattatcctgttcctgcatcggcgcggtttattgctgagagttatcatcaagccagtaatgcatttgtacaggcgttaaaaacgcaatggactgacgatacacttcaagaatgtgtcaacttaattggtcagcaattgccaaatggttcacttttgatgtttttaattcaacatcaaaaccatcatcgaggacaaatgactgtccttatgagacaagcaggtttacctgttccgggtatttacggtccggcaaaagaggaatggattaaattcggtttggaagctccgaaataggatattgttgtaagggctcgaatgaatagatgataccaatcgatgttggtatcttttttgttttagtcttagagtgattaaaccggtatccatgacatgcagacgaatcaacagttcaatagatgtaaattaaggtcaataaatgcagaaaggtgattatgatgataactaaaatgacgcgattcaatatgaaagacttcaataaaccaaacgaacctttcgtagtttcagggagaatcatcccttcatttgaggacaatgtttggacatatacagaggagaaatttgctgaaccttatgtcaaaaaatatgacgatgaagacattgatgtcagttatattgaagaagaggataaagttgtctttttttattacgcagagaacgactgtgtcggccggagtaagcttcgttctaattggaatggatacgcactgattgaagacattgccgttgcaaaagattatagaaaaaatggtgtcgggacggctttattgcataaagtgattgagtgggcaaaggagaatcatttatgcggtcttatgcttgaaacacaagatattaatgtttcagcttgtcatttttatgccaaaaataactttgtcataggagcggtcgatacaatgctttattccaatttttcaacagcaaatgaaattgcggttttttggtactgtaaattttaaatataacagtatttgatgtttcgtcatttgcgggtgtgtgtcgcaaagcattcaaaacatcggcttgaggatttataataaggtatatcaatcaatgcagggggagttatgtatgaagtgcaaaaaaatgaacagggtccaattaaaagagggaagcgtatcaatggccctataaactgcgtctgccctcattaatggagggaaatttgtgaatacgccttattcacagtcagctttacggcacaaccaagtgttcatttggctttgtgttctgtcatttttcagcgcattaaatgaaatggttttgaacgtatcattacctgatatcgccaacgattttcataaactgccagcgagtgcaaactgggtgaacacggcctttatgttaaccttttccatcggaactgctctgtatggaaagttatcagatcagctggggatcaaaaagctgctcctatttggaattatggtaaatggcttcgggtcgatcattggatttgtcggacactctgtctttcctgtactcattctggcccgatttattcaaggggctggtgcagccgcattcccggctcttgtgatggttgcagtagtacgctatattccgaaagaaaacaggggtaaagcatttggtctgatcgggtcgctggtggcaatgggggaaggtgccggaccagctattggcggaatgatcgctcattatattcactggtcatatttgctgcttattccgacagcaacagttatcaccgttccattcctgatgaaactgctggaaaaggaagaaagaatcagcgggcgctttgatatggcggggattatattaatgtctgcaggcatcgtattttttctgctgtttacaacgtcatatagactatcttttctgatcatcagtattctagctttcctgatatttgtgaaacatattaggaaaactcaagatccttttgttgaccctgcactggggaaaaatgtcttgtttatgatgggcgtcctttgcggaggcctgatattcggcactgctgcaggatttgtgtctatggttccttatatgatgaaagatgttcaccatttaagtactgcggcaattggaagcgggattatgtttcccggaacgatgagcgtcatcatcttcggttacattggagggtggcttgttgatcggaaaggttctttatatgtgctgaccattgggattgcattgatgtcttccagttttttaattgctgccttttttatagatgcggcaccttggctcatgaccgttatcatcgtttttgtttttggggggctctccttcacaaaaacggttatatctacaatggtatctggcagtttgaaacaaaaggaagccggcgccggaatgagtctgcttaattttacgagctttttatcagagggaacgggtatttcgattgcaggcggtttagtatcgacccgcttgctggatcaaaggctactgcctgttaacgctgatcattccgcttatttgtacagtaatatgctcattctttttgcaggaatcatcgttatgagctggctggtaaccatgaatgtctataaacgttcgcaaagaaatgactaaaaagggaaaaggatcaaacttgataaaagttttgatccttttttgaggagattccttattccggaagcttttgtcgatcaatgaaaggggagttcactgccaatcgggacttttgagaaagtgtatgaggatattaaaataggccggagagaaagttaatcattctgtttgaaaatgaccatgaagttcgtaagcagtatggttttaacacgcatctggattcccctggcaaagtaaaggtttttggggatttatgttaaaataatagtaagaactttgtgcagcggacagggagtttcgttgctttataaggagggggaacgatgaaaaataagattcacatactgggagcctccggagtcggaacttcaacattgggtgttgcattatcaaagcatttgcctcatacgcatcttgatactgatgattactattggacagataaattcactaagaaaagagaaattcctgaaagaagaaagttgcttgaaaaagacttgacaataaatgagaaatggattctttctggcgcagtgtgcggctggggcgatgatttaaaaagttattttgaccttgtcatcttcttatggattccgcaggatatacggctcgagagattaaggcatagggaatttcagcgttatggaaacgaagtgttagccggcggcagtaaatatgaacaatcaaaaacatttttagagtgggcttctttatatgatcatgccggaatggaagttagaagcaaagctttacacgaacattggatggcagatttatcttgtccattgttaaaaattgaaggagattactcagtcaatgaaagagttgatcgtgtcttggattatctgaattctaattaaactaacggatggagataactgcaaaatccaaaagtcaaagacagttccggccattttaacggagctgtttttttataccgctatcagtttgtctgttgtgaagtgatttattttcggcagtatcccacaatagagaagtgatttgttcttcgtgaggaaattttggttaagttgcaagagacggaactccaatgaatagatacaccctgaaacctgtccagccagcgtttaagctggttacgattgagtgaaaagccattgccgccggcaaagacaatacctggaatgaaaagtattgcagggaaagctaatttggtcattttccgtgaaaatacggaaggcttttacgctggccgaaatatgtatggcaggtaaccccggaagtggctgtattgactggagttttcactaaaaaggcgattatacgtattgcgcatgcagcctttcaaagtgcgatggaacgccgtaagaaggttacatggctcgggactctttttgaatacgtgccgagaagtggcggacaatacccagaagtggatgattatcatatcgatgcaatgacggtatatttagttcgtcggcagcttggggcttgcactgtcaattaatacaaatgggaaagcaggcaatggcccaggctgctcaaggttcggcacctgacattgcagggaaaatattgcgaatcctatcggtattatactttcaactgctatgttgtttgaatggctcagtacacagtatcgtgataaaaagctgaaagaagcagcggaattaatagaaaactcacttcgggaaaccgtgaaggcaggaatcaaaatgggagatcttggcggtcaatcatcaacgtccgactttgcagaagcaattgcagaaaggatcggacgttaaggcggaaaataagaggtgagaagcagatcatcaaaacgcaataggacacctcaatttagattttcagtaagaacggctctgctcattaaaaaactcaattcgtagattagtggcatcaatattgccgcagatcgggttagtgacataaagtgaagggatgagaccccttccttaaaaccttcaattcctctaatttcattgtaagatatattacttttttgaaatgggtatccaaatttcacttttaaaagatggcgatgttacatctttatgctcattccacaggatttctgggccttcaatttgttcataatgtgacgatggaaaccattcggaataaatccgcccccatacttcctgcagtgcattcggaaatgatccggctgcttcgaatacagcccacgttgaggcagggacttcaagctgtgataggtgatttgggcaatgtttcgttgtggctgcgccaatatagtgatcaagctctccgttttcctctgtccggccttcagaaaagttcgtggatgcactaatgagtcctacaggcgctacattagaaagctcttttagttgattgattgctgcttcatctaaactttcccacatcgatgcaatgtcaggattcacgcctttgaacaaaataggaactctttttttaatgccgacgatgcgaaatgcctctttttcttcaatacgatagttcatttcatttcctcctttgattgataactggaaggtcattcgcggataagctttaagtgaatggccattatgtttagctgctgatgggcttatgccatgcagattttgaaatgctcgtgcaaaagaatctggtgagtgataaccgtattttattgcaagatcaatcacctttacgcggctgtctttaagttcaaaagctgcaagagtaagacgtcgtcgacgaatatattccgataatgaaatacctgtaaggaaggaaaacatccttttaaaatgatattcagagcagaaagcaagccttgctgcttctttgaaatcaatatcgttcgtgaggttttcttcaatatacgttaatgcgctgttcatccttttaagcgaatccatttatttgacctcctttaacaaaagaataacaggagcgaaatgtatctgcccgacatttcgtgcacagttttgcaggataacttatatgtaataaattaagtgattcacctgtatttgtacagataaagaaaacacctaataactgcttgggtttcataagatgaaagaaagttatcattgttttatattgaatagaaaaagccgggatgtcagatccggcttttcgctcatttccccttcgactttttccgcttctctttctccgcccggtaaaactcatggaacattttcatcaatgcgcgtttttcaatccgcgacacataactccttgaaatgccgagcttatcgagatggtatttatagactgaaagagcaacttaaaactttattaaaataagagaagaccctctataggggccttaacactaataaatttgacattttttatttgcgtgcccattcattccacaaaggttctaagctgttttttaggtctatgaatatccatgggtagagggagaaaaaaataagaataataacaaaaatataagaagaaagttcattaaacaacacttttcttctggtgaaagacttgtgtttataaattggtaatgcattcttgcctgttgtatagaatacaaaaagagtaagaatcagcatccctacgcttctaaaaatgaaaaaataaaaagtagtagtattccatatactgaatgtgtatttaaataagtctataagccaaattttaaaggaggtgcctccttcaaaatttacttttatatgattagcaactatttgtaattcctgtggtactgaaaaaaacagcagacttagaagaatgcaacataaaattatttgctggataaaattgatgaagaatttacttttgtcatataagtttgatgtaagctttatggcaattgaaaaacgaatacacttaataaaccggattataaagacagccaacagaattgcaacaaaccaataatagtaactagtataaaatgcaccaaagataatgatagctatataaaaaagaacaatcataaaatagttatctgagccgggctccctttttgcattggtgactttatctatttgattttgactaggcatgaaaatgtttattatattgattttcttttttccaatatgcacagagttgttattgcctcgttgaattattttagtaggagtttctttggtagcggcaaaccctataattattgttatgatggttaacaatgatgcaataatacttagaccggtatttgtaagatcaatcaatagttaaactccttctgttctaaaaatgaattattaaacattaatcaatattcctctgctatttttagaaccttgaatgccaaggacactcagagttatgttcgaaaatttcagaactatagtcaaaaaacttaatgttgttcttcaagcttgtccattaagtctgtaaatgaatcacaaacatagctaatggaacttcccttatcttcattagcgatctcatgatcccaaaaaacaattacgggttcttgagaagacaatctataatcaaaacaaaagaggtttccccctgcatctgtagcaaaaggtatgatcttatcaactaaccgatctttaacattatcaagtgtactaaggagatcaattggtcgagttggatctcctatactcagtaaattgtttattgattctcgagaattttggaatgaaacaacctttttatctataggagagcatccattatggtctttaatgaactctctgtaatctgtcgggaacttgatttttaatttttcttctacctcttcgatctgactgtttgtcgcctctttaaaagtgcttcgttttctccatttaatactttgcattgattaacctcctatttctcatcttttccccaaattttatatccgccagtgtgaccagttttagcatgaatgactcgatctactagctccatttttccaggagtttgatggtggtgccatgtgtatttctctggtgttattccatcttgaagatcaagtaaatcatcttcgttcaaatcaagcttcttaatcaatgatggatcttcttcagtctgcttatataattgtttatttaatttatcaaaatgctggtctctactttttttaaagtcggctttatcaagtgtgagtgtatgttttgattcgaatattggaaatccgtctttatcatagggaacttttgttactggatggacatcatttttcaaatgacccattcttaagttaatggtcgttgttttgcccgcactgttttcgtacgtgtatggtgcagctttaacaaattgatcatgtttggattgtattgctttttttaatatagacgtattctttacattatgcgtattctcaatatcttgtgctatacctacaagtgctagatcatctttatttctagataaagaatttatgtagtttttccctacggtaatccctttgtttacatgtctagtagctgctttttctccagctccaatcactttatctactttggcagcaccggctttaccaagtttgcttgttactttcacagcagagccaacgccctttagtccaacaaggctcccgaccacataggtaatataatgagatcgtgagtatgcatctccgttaaccattttatcattccatgaatccgctatgtttgtccatatgatttttgcataggaaggtgtcttcaatacagctgaaattgttttggctaatttttgttcttcggagagctgggaaaactcccaagtcccgacagctaaatctttaacgccagtcacagtatccttagcgacatcgtagagaccgactccaactcctttcaggacttcccatgtggtttcaccaacttcttcgagctgttgtgcttgttcaagctgaatcacatattgctgctgggaaggttcaaggttttcatagccgatcttcttcgcaatttccaaatattcatccggatcggtcacaccgtcagcgagctttttcttcagatccttgatttcccgctctttcgcttcttcctttttaatcgtcaaataagcatccgaatgtcttgcgatatcgccttttttcttatggatgtcgctttcacggtacgctttggcgttgtagtgaagcggcgtggcgctttttcctttgcctgtggcgttttggagctgctgaaagtcggcttggatgaactgttcgtttgcttcggtttctgcgtattctttcgttagatcgtgatcaagcttgccgagtttatgtatggtatcgttcctttttttatctgctgacttaagcttttgatcgacatcttctatagagaaaacatcaagatgaatgatatcgctgatttcatcaaggatacctttcatttcattgcgctgctcctgcatgatagctgttgatttattcttcgcatgaatcaactcatgttctaaaaatgactcttccacaaacgaagcggccaatccggcatcagctacttttcctgaaatactgttaagaaacgcaatcttcatatcgatcaaatcaagccagctgtcagtaacacttgcatggtcttgaaagaatgctttgatgttatcagcacctttacctgaaaactcactgtcatctaagtcagccattccctgaaaagcttttctgaggttgataaattgttctctaatctgatcatattcttttgctcgcttttccgctgctgagattaacgaggatgcttcaaatactttcatatctgtctccttcccacttaatcttatctaaattttaccacattatattacatgtaagaagcttcttccttttgttaaagatactttcttaggagatttgaactttaacaaaatcttaaaataggattaattcagttgatgaaaaattgaagaaatggttattaggcattggtgcattatctctaagcttttctttggctgcatgtgggtctgattctgcttctacagataaaacagattcagataaagctaaaacaacagggcaagcagcagtttagcggaagaaggagaagaatcagttgacttccttgaataataaataggtgtaaaaagtggttattaatacgaaggattgaaaaagaagaacacgcagcagattcactcgctcttgttggggggggcaagtgttgacaaccctattactgtttaattaaagaaggagtataaaacctgtatcaatgatgttacgagatatctgcgacacaggttttatatgtaggtaactcatcttcttatatatgtaacattgcattttttattatgcaatagttcactctatttctgctttcaatttttcgaaccactctaaattaaccaagtgatgtgaacgggaattttcattcatgcggcgaaagtaattgattgtgccgggaatttcttgagtgatggacaggtattcatcaaggagctcgattcgagttttagtctgatcgatttgtgattggatcagattcactaatttatttttgtcgaattcatcggcaaagagtaacgccccataaaatcgcaggttcacatattccgatttggtgccgtatttgatcattaatttttcgaattctgcccttcccgattctgtgacgttaaagttacggatttcacgcgcgctggttgagggtttctgctgaatctgttcaatcaaacacttttcttcaagttgctgcagattgtaataaaatgaacctttcgtgaagttaacgatgtacttgtaatgacgtttttccattaaggccagaagttcatagccgtgagctccggggttttggatgagcaagccaaggataagtaagggaatcatggtttcatcaccttcgccatccgcgcctcaaattccgcgtacgtgattttacccgaagccaaatccatactatgaaggtaaatctgttctgttttagaatagtcaccattcactttcagtgattgctcctctcccgaaatgggtttcaggatatgatgctttttcgaaaaagcctcgaaatagcggtaaccgaatttgcgttgtgaagctgcgtctaaatgaatgccatcaggattcgcagtcaaacctgccgcagtaacaaaataacaattctgttgttcattagcaaaacgcagcaattgttcattaacttgtcgaaattcagtcgcgtgctgtccaaaaccagtcttcccaagaaagtcaccaagccctccaataatcaacggtacctcatctaattccaactcgtttcttagcgtcccgatgataagagttaatttctcgtaataagtttcatgcagcgaacgataactgtcactttcaccttgatgccaaaggattccgcaaatttgactggatcggagggcgaagcgggcttcggacaaagcatgctgaaaaaggatgccttccggatgccagtcattcaatgaactgccaccttccgcacaagggatcaagccaatttcttcatcgggatgagctttcgaccatgcatctgcaaaagatgccgccaggccaacgccggaaaccggacgatcgtaattaatcggctctgtcatcatctgccattgtccattgcgcagcattttaattttttcattatagatagggtctacttcattcaaaaatccacggcccgccatattcgactgccccaacattaaaaaagactttatcatctaatttttcacttctttacatcaatattttagtctaattagactatagtcaattcagcttgtcttgtaaagtttcaactaggttttatttttttattagtatgtatgaaaaacaaactaacattgaacatttggtggatgtatttgagaattagcaagttcttttgctttaggtcttgataaacaatgaaaaaacaacaaaaaccctgtcatgtaagagttcctatgaggttcaaaatcatttttcataggaaatacattcaatgatgggggtgtagcccaaatgaaacggattgttaaaaaaagagggctatgttgaaggggttaaatatcaatgaaaaattattaaaaaggttaacgattgtaccaattttattcatttgttatgttttatttttaaatcctgaagttatacttgaagagcaatgtcctaaaatgcagaaaaagccgggatgtcagatccggcttttcgctcactttcccttcttcttccgcttctccttctccgctcgataaaactcatggaacatcttcatcaatgcgcgtttttcaatccgcgacacataacttcttgaaatgccgagctcctttgcgatctcgcgctgcgttttttctttttttaaatcaagcccgaagcggccgacgatgacttctttttcgcggtcgtctaaaatatcgatatattttttgaccttttcaagttccatgttgagctgaatggtgtcgatcacatcttcgctttccgacttgaggacatcgatcaggcttatttcattcccttctttatcctggccgatcggatcatgaagggagacgtcttttttcgtttttttcaatgcgcgcagatgcattaaaatctcattttcaatacatcgtgcagcatatgtggcaagcttcgttccttttccggctgagtagctttcaattcctttaatcagcccgattgtaccgatggagatcagatcttccgcgtcctctcccgtgttttcgaattttttcacaatatgggcgactaaacggagattatgttcgatcagcatgttgcgggcgtgttcatctccttcagccataaggtctaagtattttttctcctcattatttgagagcggttgtggaaaggcattatttttcacgtatgatactaagaacacaagttctttcacaataaacccgagcgctgcaaaaacacctgtcaccgtcctcacctccacaaagttatgtaggcaatcgcctatatgtaactgtatgtggaggtagggctgtttgtgtctgtacagggaaattaatcaaaatcgggttttatttcttacagcctcttgatttttgatgattgagcctgtatattttttaaaaaagtaagggtgaaaacaatataaccgaaaagcgctgaagagacgagtagacagatatcattcatgacagagagctccgggagctgtgaaggagtatgaatggatgtgttgaaacaaacctcttagcttcgcatcggaatcatgcaacccgacgatgatgcggcggatactcctgttaccgagtaagctttgtacccggcaaggccggcaccaaaccgaattgaggtggcatagcgggctgtttcccgtcctcaagactttattgtcttgagggcgttttttatttctaagggagggataagatgaaaaacctgaagtcttggcggtacccgttgcttctgttaaccggaatcgggatagcaaatattggtgaatggatctattttttgtctcttaatcttattgtcttaaaagaaacggggtctgcttttgcggtttccatcctttatttaatcaggcctgcggctgttttgatgacaaatggctgggcgggcagcatcatcgaccggtgtaacaaacggaatatgatgatgtcgcttgatttcacccgggctgcattcattgccgttctgccgctgatggttactgcacggtctttattttccgtttattgtatcgtgtttttgattcatatggccaatgcgatgtttcgtccgtgttccatggcgtatgtgacgatgcttatcccggctgaaaggagaaaacgattcaattcactaagggctttgtcggaatcaggggcttttctcctcgggccggctgcggccggactgctttttatcgccggcacgccgatttttgcgatttgggtgaatgcggcggctttagtgctgtccggtttcatcacgatgatgctgccgaaccttgaaaatgagcctcacgtacattctcccagacagaagctttctttggcagtgtgcaaagaagattggaagctcgtctatcgcttcagccgaacggcgcgaaacgtcatgatcatttattttttattcagtctggtcatgaccgttatgccatccgcgcttgattcgcttgaagccgcttttgcaaaagaggttcttcagctgactgatgccgattacggttttctcgtcagtatctcaggggcaggcattattgcgggggcgcttgtcaatgtgttctttaataaaaaaatgccggcttctttattgatgggaatgggctctttattcacagcggccggatatatgatttatgcgttttctgacgttttttggacggctgctttcggatttttccttctcgctttttttctggcgtttgccaatacaggctttctgacgttttatcaaaagaatgttccggtggacatcatggggagagtggggagcttttattcattagtcgaagccgtcttcattatagtagtaacggcggttttcggagcggcttctgtcagttcttccgtccgcggcattgtcatcgcaggcgctgctgttatgctggcgttggcagccgttttatgctcgttcttatttgcgtccgcaaaaaggaggactcctgatgtatttcaagcggatcaatttaaacaaacataaagagacggtcgtttcgtttcgtgaggattcgtttttcgtcagctttggcacggcggatcattttaatagggatgaatatctcagatggctgtcatcccaaatcaaatgctttcccgacggttttatgctgctttttcataacggacagccgatcggacagctagaagcttccatcaaattttaccgcagccaaaaaatcggttatgtgcacctttactatatgactgagaagcagaggggaagggggtgcggaacgaaaccgcatcaatacgtgagtcagtttttcagagcggctctgtcattttacagaaagaaaaacatggaagtgatcggttcagaatgtaacggaaaagttctcagaatgagaggagccgtaccgccggaatagtggcggtacgcgcttcattttttcgttgtttttaaaaggccgggaaacttcttataaatgaccgccattaagacgagcatatacattccataaatcccgaaagacagcagtttgttgcttgtaaatgaagcgcctgcgacggtcacgatcacaatgttcggaattttgccgagcaccgacgcagaaaaaaagatcggccatcggatattactcagcccgcagacggtattcatggcaagcgacggtataatcggaatcagccgcccgaaaagcaccgccgtaaacgcgtgctgatgaaatgaatcttcatattgggccgctgccgggtaagccagcagcttttttctggcccagtctctgaatccgtaccgaacgagaaaaaacaatgccattgttccgagcatcgcgcctgacaatgtaatccacaccccgtttacaatcccgaaaaccgctccgtttaaggccgcgataatggcgaatggaacaatcggaaaaaatacgtcagctgcgaccagaaggatactcataagcacggcgtacatgccgcccgcgcgaatcatgctgagccagacgtctttttgcaaaaagccgatcatcacgacagcaatgatgacggcaagactgaatcccttttttatcatctgcacgttcacctcttttcaattagtatacagcacaaatctatctccttctattaaaataagctgtccgataagcgtatttgatttatcagcatttgccgtttgatgagaaacggctgcacccggatttggacaaaaacaagcgggaagcgggtgatgtgcatcatttgatgcagagaatgattttttataaaaggggacacgttaacagtagtgtttactggaggtgtaaacgttgagatgctttcatctgatcatcatgatatgcgtcctcacgagtctcactgccgtgtctgccgatgcgaaatctttaaaaagaagtgacatggagaagacgggaaacgtgtactgggatataaggtctgaaaaaaagaaactatctttaaccttcgatgacggcccccatcctgtctatacggaggctgtgttagacgtgctgaaacagcacaatgttaaagcaacctttttttgtgtcgggagccgtatagacaaataccccataacggcaaaacgcatcgttgaagaagggcatgaaatcggcaaccatacgatgaaccatgtttattttcaccgtctgaaacgcaaagacattttacaagagcttcacagctcagcgcatcatatcacatcgctgcagccggaaggggacaagttattccgcccgccgggagggtcgctgaatcatacggctttcaaaagcatcttaaaagagggctatcatatcatcatgtggtcatggaaccaagacccgagggactggaaaaggcccgggaaaggaaaaatcgtcaggcacgttgtttcacatgccagagatggagatatcgttcttctgcatgacggcggaggaaaccggcgccagacggttgaggctttgaaagaaatcattccaaagctgaaaaagcagggctacacgtttgttaaggtttcggatttgatcggacaggattccggtccttttcatattcagtaaagagagcgccgcgttgaaagccgccaaagagatgtgtaccataggaggtaaggtttggggggagagaaaatgaagtttgctgttctttttattacgataatctgtctgttatcaggatgcgccgcgggcaaagaaaaaagtgttgtcgcgttcggcgacagcaatacgcgcggttccaactgggattatcgtgattatccgaaggcacagcagtgggtaaacattttaaaaacagcggaacgcggccgtcttacggttataaatgcgggaataggcggccagacgactgaggatgcgcgcctgcgctttcaaagcgacgtgctggaccgtaagccccaatatttatttatcatgttcggaacaaatgatgcgggcattttgacgggcgatcagccgcgggtatcaaagaaacggtttaaagaaaacctgacttatttcataaacgaaagcagaaatcacggcataaagccgattttaatgacgtgcatcccggttatagaaggaaacggaacgcatcatctctattactattcgagatataaagcctcagcctttaaagaaaaaggcggcgcgagaaaatggcataattcctataacggcgttacgaggcaggttgcagctgagttgaaagtgccgctggtggataactggaaacactttatacgcgcggacggcggcaaagatacagaccgggcgctgatccaatccggactgatagatccctccggaaatcatatgacgccaaaaggcgccagaatcttaattgaaggcataaaaaatgggcgggttttggaacgctgacgccgtcagctgcctaaaccgttttgcttctgcttcataggctgtagaaaaaacatctttttggaggcgattgctatgaaccgcggtttccctccgcaatatcctgtatgcccgcctcctcgggtgaatgcggggtactggtacgcattttttgttgtgctgctcgtcgtcattctcgtcctgggcggtctgtattggttcaatatatagcagccgtcctcttaaacacctctattttaggggtgttttttgttgaaagtggtagtaatgcgcataaccgaagtgatataatatcagtcatctgagtaaaaaaaggaaattcgcccgggaacttttttctgtttaagaagaaacggaaataatgtgtccgagcgatcttcttttgatttcgttctcaattaactcgataaattcacggctcaaattcatttcattggctttgaaataagattctattagtaattcatcagaaagctttctcatgccggggacccaattaatgggagtggcacctccttacaattgtaatcaatcatcagacgcaagcatatgatggaaggttgcgtttcaatcatggtgaggttatctttaatctaccatgaaatacaaataagaacaatcgttctgttatccacactcgtaagtggataacttgttagtatcttgtttataatctggataaatccggatgtaataagagtggataatgtgtgtaattttatccacaactggtgaagaaacccaatttttgtcgaaatttttttactgagtccgactttgtttttaaatctgacaggtttcgacatatagatgatagaaagaaaaggaagggtgcgggttttgttaaaaaagttttttttacctgacgaatttgtgaaaaatatatttcatatcacaccggaaaagctcaaagaacgcaatgtgaaagggattattacagaccttgacaacacgcttgtggagtgggacagaccgagtgcgacacctcgattaatcgagtggtttgaagaaatgaaggagcacggcattaaagtcacgatcgtctccaataataatgaacgaagagtgaaattattctcggagccgcttggcataccgtttatttataaggcaagaaaaccgatggggcgcgcctttaaaagagccgtcagcagcatggatctgaaaaaagaagactgtgtggtcatcggcgatcagctgcttactgatgttctcggcggaaacagaaacgggtatcatacgatcctcgtcgtgcctgtcgcttcctctgacggagtcatgacgcgctttaaccgccggattgagcggagaatattgagttctttgaaacgtaaaggccatattcagtgggaggattagaaatggaaaaggttgtttgcatcggctgcggagtaacgatccagaccgaggatcaacaaggtctcggatacgcgccaaaggcatcgctcacgaaagagaatgtcatctgccagcgctgcttcagactgaaaaattacaatgaaattcaagatgtttcattaacggatgatgactttttaaatatcttgcacacaatcggcgatactgactctcttattgtcaaagtcgttgatatttttgattttaacggaagctggataaacgggctgaaccgctttgtcggcggtaatccgatcattcttgtcggtaataaggccgatatcctgccgaaatccgtaaaacgggaacggctcgttcaatggatgaaacgcgaagcgaaagaatacggcttaaaaccccttgatgtctttttaatcagcgcttcccgcggacaagggatgaaggaagtcattgacgccattgaacattaccgcgaagggcgcgatgtgtatgtggtgggctgtaccaatgtcggcaaatccacatttatcaaccggattattaaagaggtctcaggggaagagaatattattaccacctctcaatttccgggcacgacgcttgacgcgattgaaatcccgctcgatgacggatctgcgctttacgatacgccgggaatcattaaccatcaccagatggcgcattacgtggacaagcgtgacttaaaggtgctgacaccgaaaaaagaactgaagccgcgcacttttcagctgaatgaaaaacaaacgctttatttcggcgggcttgcccggtttgactatgtatcaggcgataaaacggcgtttgtctgctatatgccgaatgaattgatgattcacagaacaaagcttgaaaatgctgatgccttatacgaaaagcatgcgggagaactgcttaccccgcccggaaaagattatttggatgaatttccggagcttacgccccacacgtttacgattaaagaaggaaagacggatatcgttttttccggtctcggctgggtcacggtgcagcaagcagataaaaaaataacggcatacgctccgaaaggcgtacacgtatttgtccgccgttcattaatatagagagaaggggagagggagcatgaaacaattgtacggagtaatcggtaatccgatcgggcattcaatgtcacccgatattcataacgcggctttgcaagataagaacatcaacgggcagtattttgcgtttcaggtggaacctcatcatctcaaggacgccgttaacggaatcaaggcgcttggcatctgcggagtgaacgtcacagtcccgcataaagtcgcgatcatggagcatctggatgaaatacatgaaagcgcgaaagtactcggggccgtaaataccgtcaaaagagagggagacaggctcatcgggtataatactgacggagatgggttttataaatccttagtcaaagtattggacaaaccgatatcagagctctccatcctcatgattggggcgggaggagcggcaagagcgatttttacgacgatcgtccgcagagagccgaaacaatttgacgtttgcaaccgcacgccggaaaaagcagaaagtctgattgcggctgctccctcttttcagcagaaacgcgcccttactttaaaagaagctgaaaatcagcttgaacaatatgacgtcattattcatacaacatctgtcggcatgtatccgaaaacggatgccgtgccgctctcattggaacgggccaaaacgggcgccatcgtttgtgatatcgtatacaacccgattcaaacggcgttcttaaaagaagctgaaaaaagaggtttaacaacccttgacggtgtcggcatgtttgtggaacaggccgcactgtctttcaagctgtggacggaacaagagcctgacagcggcttaatgagagcgattgttgaaggaaaactaggaggaacacaatgttaacaggaaaacaaaaacggtttttgcgttcaaaagcgcatcatttaacgcctatttttcaagtgggaaaaggcggagtcaacgaaaacatggtgaaacagattgccgaggctttagaagcaagagagctgattaaagtcagcgtgcttcaaaactgcgaagacgataaaaatgatgtcgcagaagcccttgtgaaaggcacccgctcacaattggtgcagacgatcggaaatacgatcgtattgtataaggaatcaaaggaaaataaacaaatcgagcttccgtaaggtggttgacatgaagaaaatcggaatattcgggggcacatttgaccctccgcacaacggacatcttctgatggctaatgaagtccttcatcaggcggagctcgatgagatttggtttatgcccaataaaatccctccgcataagcagaatgaagactttacagacagccggcaccgggtggagatgctgaagcttgccatcagctctaattccggctttaagcttgagcttgcggaaatggaccggaaaggcccttcttatacctatgataccgtccgtttactgaaggagcggcacccgaacgacaagcttttctttattatcggggcggatatgattgaatatctgccgaaatggtacaaactggacaaactgctcacgctcattcaatttatcggagtgcggcgcccggggtatcatattgagaccccgtacccgctgctttttgccgacgttccggaatttgacgtttcgtcaacgatgctgagagaacgtctcaaagcaaaaaagccgacgcaatacttaatgccggataaagtgaggcagtatatagaggagaatgatttatatgaatcgtgaggaagcacttgcctgcgtcaaagagcagctgaccgagcatcgctacatccacacaatcggcgtgacagatacggcggttattctcgcaggccggttcggagcagacccgaaaaaagcggaaatggcggctatttttcatgattatgcgaaattccggccgaaagaagaaatgaagcagatcatcgtgcgggaaaaaatgccggctgagctcttggattacaatgccgagctgtggcatgcccctgtgggagcgtatttggctgagaaagaagcggggatcactgatcctgagatcttggatgcaatccgctatcacacgtcagggcgtcccggaatgacccttttagacaaagtcatttacgttgcggattacattgaacccggacgccatttccccggagtggaagaggtgcgccgtctggcggaaacggatctgaacgaagcgctcatacaagcgatgaaaaatacaatgatatttctgatgaaaaaaaaccagccggtctttccggagacgtttgcaacctataactggctggtgtctcaaaattgacaggaggaatatggaaatgaatcaagcttccgtattaaaaatcgcggcaaaagcatgcgacgataaacgtgcagaagatattttagcgctggacatggaaggaatctcacttatagcggattactttttaatctgccacgggaattctgataagcaggttcaggcaattgcgcgtgaaattaaagatcaggcagaagaaaacggcattgatgtcaaaaagatggaagggtttgatgaggcccgctggattttagttgatctcggcgacgtcattgtccacgttttccataaagatgaaagaagctactacaatcttgaaaagctatggggcgacgcgccgctcgcagagcttgaactcggcttgaactcatgatttaccaaggcttcgccggcgtatatgacgagttaatgtcacatgcgccgtatgatgaatgggcgggctggatcgaagcgtctcttccggaaaagggaagggtgcttgatcttgcctgcggaaccggagaaatatccatcaggcttgctgaaaaaggctgcgaagtcacggggattgatttgagtgaagatatgctgagctgtgcccagcagaaaaaaacgggaaagccgattctttttctccaacaggatatgagagagctttccggttttgaagaacagtttgatgccgttgtcatctgctgtgattccctaaattacttaaaaacgaaaagtgatgtcttaagcaccttcaaaagtgtttttcaagttttgaaggagggcggcctgcttctgtttgacgtccattctccatttaaaatgacggagctttttccggacagcacccatgcggatcaggatgagcagatcagctatatctggcaaagctttgccggcgatgaagagctttctgtcatccatgatatgtcctttttcgtatggaacggacaatcttatgaccgttatgacgagacgcatgagcaaaaaacattttacattgaagaatatgaacaaatgcttgcagagaccggatttgaactgaagaaggtgacggctgattttacagaccggcctccttcaacagagtctgaacgtcttttctttacggcaggcaaaccaaaaaccatcgtttaaacggaacgatggtttttaaaatgcattttttgcgattggcgcgataaagcactttatggcatactcagttacacgtgaaattgcttcttcactaacgatatatcttcatcgtatttgtcatgtgtacgctgaaagacacggttgaacatatcctgaacaccgctttcgagagccttcagtccttccccggtgacgccgccttttacgcatactttttcctgcaaggcgggaagcgtgtaatgccctgtttccagaagctttccgagaccgacaagcatctccgtcgacataatcacggcttcttctttggtgatgtccgtttcttccactgccgcgtcaataaagcgctgaacgagataactcataaaagcgggcccgcagctgacaatgtctgacgccgctcttgtaatgccgctgctgatttccacaggttttgaaatatgagtgaacagcgtttgaatatccgcttttgcagactcgctgcagcttttgccgaacgtaacaagcgagacgccggccaaggcgcggttcgtaatgctcggaatgacgcgggccgtctgacacggaaccgtatgttcaatctgatccgtctgaacggggctggtaatggagattaaaatgtgatctttccgtaaatgcggtgtgagttttttcagcaaaggatatatatccagcggttttacacaaatgaatattatttcattatcctgtacgagcttttcctgatcctcggtgacatggatgccgctgaaacgttcttctagttttaatgctttttcgattgttctgtttgtgatggtgatatgtgagggatcggcagcgtttgattcgataaacgattcaatcaggatcgttcccatgtttccggtgccgataaagcctattttcaatgaattcccctcctttttcccttaatcctctaaaccttatgcggggaggcaatgcaatatgacgaaagcgatgatgacggagcggctgcggcggaacctgaaaattctgggcgcttgtcttgcggcaggggcggtttttatctgtatttggctgtttcgttctgacaaggaagagccggtcaaacagcagtccgtgctcggccaaacagcctcagcatccgtcgcggacaaaaaagacaccgcagccgacaagattatgattgatgtgaaaggcgcggtccgaaatcccggcgtgtatgaaatgaaagcgggagacagggtgacgcaagccattgaaaaagccggcggcctgaagaaaaaggcggatgaattgaatgttaatttagcagagcagctgcaggacgggacgattgtttatattccgagtgaaggcgaagaggagaatcgcccgaaaacagcagcgggtgaaaaggagaatgcagctgttaatatcaatacggcatctctggacgaacttcaggcgatttccggggtggggcagaaaaaagcggaagcgattatcgcataccgagaagaaaacggacggtttcagactgctgaagatttgatgaatgtatcaggctttggagagaagtcatttgagcggataaaaacttccattacggtaaagtgaattgacggttttgcttaaatctatgtaaacttagaaaagcaacaagattttttggagggaacacttgtggaacgaatctcatggaatcaatattttatggcgcaaagccatttgctggcgctgagaagcacatgtccgagactgtcagtcggggcaaccgtagtcagagacaagcggatgattgccggcggatacaacggctcaattgccggcggcgtccattgcgctgatgaaggatgccttttaatagataatcattgccagaggaccatacatgcagagatgaatgcgattctgcaatgttctaagttcggtgttccgacggagggcgccgaaatttatgtgacgcattatccttgtattcaatgctgcaaatcaattatccaggcaggcatcaaaacggtttattatgcggaagattacaaaacacagccttatgcaaaagagctgttcagccaagccggagtcaaggtggagcaggtcgaacttgatgaaatgatcatcgatctgaaaaaccgcgaaaaattgtcttttgtagcaggtctgattcagcaattatctgatgcgggggttaaggcagatgaactgaaaaaaattcatgaacaggccaatgagctgtttaccagttacgtataaatgaaatataaataccttcttctgcctctggcggcggtttctgcaactgcgggaattgccgccgctcatgtcttctgggttctgctcctttttcttctgtatcttctctttattattgtaaaaacaaagcaccatgctccggttatcgtctgcctcgtttctttttgtctttatttctttctttatacggtttgtgacgctgcgaatgtaacgcgctatcagaccggcagttatactgaacaggccgtcatcactaacattccgaaggttgacggagcgaaaatgtcagccgttatccgtacacatgacaaggaaaaatgggcggcttcgtacaaaatccggtctcttgaggaaaagagactcattgaacagcttgaaccggggatgcgctgcacgtttacaggttctctggagcagcctgcacattcgacggttcccggaggttttgattataaggaatatctttactctcagcagattcactggttattttccgtgacttccattcagcagtgtgaaaaatccaaacagccgctgtttaaactgctgaacatcagaaaaaatttgatttcgatcattcggaatcacgtgcctgaatcttccgccggaattgttgaagcgctgaccttaggtgaaagattttctatagaggacgatatactgagtgtatatcaaaatttgggagtcgttcatttaatggcgatttccggaatgcatgtcggtcttattacggcgggattattttatgctctgatcagaatcgggctgacaagagaaaaaacgggaattttgctgctgctgtttttgccggtgtatacgctgctgagcggtgccgccccatctgtattgcgcgcatccctcatgctgggattttatatcgccggaactcttgttaaacgcggcattcattcctctgctgcattgtccctgtcttatctgctgctcctgctgtttaatccttacttcctttggcaggcgggcttccagctttcctttgcggtaagcgcctctttaattctgtcatcctccattttaaagaaagcagggaaaagcagacttgccgggcttgcgatggcatcattcattgcagagctcagctcacttccgtttcttctctatcattttcagcagatttcacttgtcagttttccgatgaatatggtgatggtgccattttatacgttatttgtcattccggtttctgtcatcggtttccttcttcttttactttcaaggcaggtgggagaatgtttgtttgatatgtttgaccttgtgatgaagcctgtgcatgatttcattacatatgcggcatccgttgatttatttactatgattgtgtcaaagcctgactttctttcccttctgctgcttgcggtttccgtttttacgctttttgcggctttggaaaagggaggttttttaaaactcaggaagtcggctctttttttctgcgcggttttggcttatttaatatgccgtccgtatttcagtccatggggagaagcggatatgcttgatatcgggcagggagactcactgtttataagcgcgccgcaccgcaaagggaccgtaatggttgatacagggggagtgattgcttatcccggagaatcatggaaagaaaaacgtcacccgtattctatcggcgagaaggttttgattccatttttaaacggaaaaggggtgaaaaagctggatgcactgattttaacccatgcggatcaagatcacatcggggaagccggagtgttaatcaaaaatcatagagtcaaacggttaattgtccccgtaggattcgtaaaagaaccgaaagatcagaacatattaaatatggcgaaagaaaataacattcccgttgccgaagcaaagcggggcgacaccattacagccggtgatcttcagtttcaggtgctgtctccggagtcgtctgacagaaggagtaaaaatgattcgtcactggtgctttggacggtttttggcggagtgagctggcttttgacgggagatttagaatcggacggcgaaacagaagtgctgaaaacgtatccgaatctgaaggctgatatattgaaggcgggtcatcacggcagcaaaagctcaacgagtgaagcctttttgaagcagcttcagccggaagcagcgctgatttcagcaggaaaagagaatcgataccatcatccgcatgaagaagtgctggatcgtttgaaggcgtactctgtaaatgtgcttcgcaccgatatcagcggaacgattcaatacagatttaaaaaaggcgccggaacgttttccgtcttccctccatatgatatagaagaaaccagggcgcaagaagtaaaaaagactgccgattgacagcagcccggaatgcggctaagagccgataagatggatggctgttgccatcacgaacaaaaaggcgaaaaatccgaaggacacgacaaaaccgacagctgagtcaacagcatcatttcgtttgctttgaacgtttttttcaaaatcattcaatttcatccctcctgacttccctaagtatactggaattgttttgaaaaatctagaagtgatggtaacgttttctgttcttgtgattatcgcctttttacaagcagacccgggagcttgtgaatcaggcgtttattataaatgaggaagctgtccttaaagcttcctctttactaattgccgaactcaatttaggatagaaggggatcaagaaagagaggaagtcatacgatcatggtatttgatgtttggaaagccctgaaaaaaggggatgtccgctccgtttattgtttatacggaaaagaaacgtatctgctccaagaaactgtcagccggatcagacaagctgtcgttgatgaggagacaaaggattttaacctgtctgtttttgatcttgaagaagatccgcttgaccaggccgtaaccgatgcggaaacgtttccgtttatgggggagaagcggctggtcatcgtaaaaaatccgtcttttttaacaggggaaaaaaagaaagaaaaaatagagcataatacagccgctctggagacttatctgaaggagcctgcgccttatacggtctttgtgattgtggctccgtatgagaagctggacgaacggaaaaagctgacgaaagcgctgaagcaaaaagcccttatgattgaagctaaggagctgaatgcaaaggagacgactgattttacgattaatctggcgaaatccgaaaataaaacgatggatacagaagctgccgagcatttggttctgcttgcaaacggccatctgtcttccatatatcaggaaatacaaaaactctccgcctacaccggtgacagacatgagatcacacttgaagatgtccgggagctcgtcgcaagaagtttggagcagaatatttttgagctgatcaacaaaatcgtgaaccgaaaacggacggaaagtcttcaaatattttatgatcttttaaaacaaaacgaagaaccgatcaaaattatggcgctgatcgccaaccaattccgtctgattatgcagacgaagtattttgcgggacaaggatacggccaaaagcaaatcgcttccaacttaaaggtgcaccccttccgggtaaagttggcgatggatcaggcgaggcttttttcagaagaagagctgcggcgtattatagaaagactcgcagtgatggactatgaaatgaaaacggggaaaaaggacaagcagctcttgctggagctctttctccttgagcttctccgcactgaatgaaaaaaacgatccccgttaaagggatcgtttttgtattatgcagaaagtccgttcacttgtttcgcaagtctagatttgtatcgagctgcggcatttttgtgtacaagacctgttttcactgctttatcaatgcgtttcgctgcttcagaaagagcagttttcgctttatccgcttcgttgttagcaacagaagcttcaacttgtttgattgcagtacgcatagcagatttgattgtcgcgttatgagcgcggcgttcgttgtttgtttttgtacgtttaatcgctgatttaatgtttggcatgtgtttcacctcctaagatacaacctgtagcacagtgtcttaaggttaaatcttcttcacaatagaacaaattgtattctatcaaacagaactttagattgcaatataaatgtaaagtatttttcgttgatgggtaaattcgcatgattcgttttgtaaatggccacactatgtaccacgatgattgaaggaggtcttccctgtgaaaaacaacgaactggatgtcaatcaatttctgatacggacggatttagcggtagaaacgaaacaggcggtaaaagacggacaagccggtcagaaaaaagaaataaacgggtttattgaaaaagaacgcgacaagggcggcattaaagtcagaaccgtcgatattaccaaagaaggcgccgagctatcggggaaaaagcagggacgctatgtcacgatcgaggctcaaggggtccgggaacacgactctgacatgcaggaaaaagtaacggaagtgtttgccgaggaattttccgcctatctgtcggcattaaagattccaaaggatgcaagctgtttgatcgtcggtctgggcaactggaatgtgacgccggatgcgctcggccctctcgtgaccgaaaaccttcttgtgacaaggcatctgttcaggcttcagccggaaaacgtgcaggaagggtacagaccggtcagcgcgcttgctcccggtgtgatgggattaacgggaattgaaacgagcgatattattcaaggtgtgatcaaagaatcaaagccggattttgtgatcgcggtagacgctcttgcggcaagagccgttgaaagggtgaacacgaccatccaattttctgatactggcattcacccgggatcaggcgtcggcaataagagaaaagaattaagcaaggaaacgctcggcattcccgtcatcgcaatcggggtaccgactgttgttgacgcggttacgatcgcaagcgatacggtggattatatattaaaacatttcggaagagagatgaaagatgacagcccgtcaagatctctggtgcccgccggaatgaacttcggcaaaaagaaggtgctgacagacgaagaccttccgggagaaaaagaacgccaatcctttctcggtattgtcggcacgctggacgaaaacgaaaaacgccagctgattcacgaagtgctttctccgctcggccataatctgatggtcacgccgaaggagattgacacctttattgatgatatggcgaacgtacttgcaaacgggttaaacaccgcccttcatgaaaaagtgtcacaagataacaaaggttcttataatcattaaaatgagttctacctcctctagcttgttcatagagtaattactagacaagcgctggagggattcaaatcatgagaaaaaaacgcagaaaccgtcaaattgtcgttgcagtaaacggtggaaatgcgctcaagggcatgtttttgtttatgacaagccttatcgttattttcgtattatcgggtgtgctcacatcgcttcgccctgaactgaggctttcttcggattctcttcacgggattgccggagaacttccgggtgacgcgtttgcacacctcctcggcatggaaaatcattatttcgcctcagagcttcctgaaaaagactcttttcagctgtcccggctttccttaaaactggcgacaagcattaatatggaagacccgcggagtttcttgggacgtgagctgccgggatttgcccaatacgatacggagatccttctggcggggcaggggacggattatacgaatatgccggctgaatctccgccgccgtcaaaggtgatggaaaaagaaaaagaagtgaacctggcagaaatcgaaaacaaaacgaaaaaagaagaaacggcgccgccgaaacattcaacaggcagcaaaaaagtcgtttttatttaccacactcataatactgaatcctatcttcctctgttaaagggggaaacaaatccggataacgcccgccattcgaaggccaatgtcacacttgtcggagatatgttcggaaaagcgcttgaagcgcaaggtgtaggagcgaccgtagataaaaccgacattcaggcccgtctgaacaaagacggtttaaattatgcgcgaagctacgacgaatcaaggccggtcgtaaaaagcgcgctcgccaaaaataaaaacctgcaatataccatagacattcaccgggattcccgccgcaagaaaaatacgacagccgacatcaaaggaaaaagctatgccagagtcgccatcgtcgtcggcaaaaaaagcgctaattttgaagaaaactataaactcgcaagtgaacttcataagctcatggagaaaaaataccccggcttaagcgtcggtgttttatcaaaaggctctccgggagataatggagtatacaaccaggatttaaacgaccggtcgcttctgctggaattcgggggcgtggataacaatcttgaagaactgaggcgtgcatcagatgccgtggccgatgtgttcagcgaactgtactgggatgcagaaaaggtcagctcgcaatcaggagagaagaaaaaacaatagaaatcaggtgattcgaatgatccgttttaccggcaaatgcctgctgatcgccattgtcatgtttttcggcgttttgttcggcatgcagcaggcaaacagcggaatgcttgatatgaaaggatacaaagatccctccttaaaaggagcattcacgctcggcggcggagaaggacaggaaaaagaagcttccattttggggcaaaccgttacggcgaaagatctggaagaaaaacaaaaacagctggaacaggcggaaaccttcaacctgttttcaaaagccggagaaaccctttcaaataccgtgacggactcggcgcaggcgatgtatgagtgggtttcgaaactgaaccgttagcattgatgaagagaaaagcggatgattccttaaaggaagcttttctctttcttgttttaattgaatgtttacaatcctattgatataatctaagctagtgtattttgcgtttaatagtaggagtgatagattgtgacagataaagaaaagcgtttagagaggcagtcaagaatccggaatttctccatcatcgcccacatagaccacggcaaatcgaccttggcggatcggattttagaaaaaacatcggcgatcacccagcgggaaatgaaagaacaattgcttgattcaatggaccttgaacgcgaacggggaattaccatcaaattaaattccgttcagctgaaatacaaagcaaaagacggagaagaatatatatttcatctcatcgacacgcccggacacgtcgactttacatatgaagtttcgcgaagcctggctgcctgtgaaggcgcgattctcgttgttgatgcggctcagggaatagaagcgcagacattggcgaacgtctatctggcgcttgataatgatcttgagattcttcctgtcattaataaaatcgatctcccgagcgcagagccagaacgtgtgcgtcaagaggttgaggacgttatcggccttgacgcttcagacgccgtcctcgcttcagcgaaagcgggcatcggcatcgaagacattttagaacagatcgtagaaaaagtgccggctcccgcgggagatccggaagctccgctgaaagcgctcatctttgactcgctttatgacgcgtaccgcggagtcgtcgcgtatatcagagtcgtagaaggaacggtcaaaccgggccagaaaattaaaatgatggcaaccggaaaagagtttgaagtcatcgaagtcggcgtcttcacgccgaaagcgcagccggctgacgaattgacagtcggtgacgtaggctatttgacagccgcaatcaaaaacgtcggcgacacccgtgtcggtgatacgatcacgagcgcggttaagcctgcggcagaagcgcttccgggctaccgcaaactcaatccgatggtatactgcggactttatccgattgacacagccaaatataatgatttgcgcgaggctctggaaaaacttgaattgaacgattcatctcttcaatacgaggcggagacgtcacaagccctcggcttcggcttccgctgcggttttttaggaatgcttcacatggaaatcattcaggagcggattgagcgtgagtttaaaatcgacctgatcacaacggcaccgagtgttatctatgatgtgtatatgacagacggcgaaaaggttgttgtcgacaacccgtccaacatgcctgacccacaaaagatcgaaagaatcgaggagccgtatgtaaaagcgacaatgatggtgccgaacgattatgtcggtgcggtgatggagctttgccaaggaaaacgcggcaattttatcgacatgcaatatttagacgcaaatcgtgtcagcattgtctatgacatgccattagcggaaatcgtctatgagttttttgatcagctgaaatcaagcacaaaaggctacgcgtcctttgattacgaactgatcggctacaaaccgtctaaacttgtcaagatggacattatgctgaacggagaaaaaatcgacgccctttcatttatcgtgcatcgcgattacgcgtacgaacgcggaaaagtaattgtggaaaaactgaaagagcttattccgcgccagcactttgaagtaccgattcaagcggcgatcggacagaaaatcgtggcccgctcaaccattaaggccatgcggaaaaacgtccttgcaaaatgttacggaggagacatctcgcggaaacggaagcttcttgaaaaacaaaaagaaggaaaacgccggatgaagcaggtcggctcagtagaagtgccgcaggaagcgtttatggccgttcttaaaatggatgacagcccgaaaaaataacggaagccgccgcagtcccgcgctgcggcttctttctgtaaagaagaaggtgtttcaaaatgaaatcagcttatattcatattccgttttgtgagcatatctgccactattgcgatttcaataaatattttattcagagccagcctgtcgatgagtacttaaactcactcgaaaaggaaatgataaatacaatagaacggacgggacgccctgatctccgcacgatttttatcgggggaggcacgccgacatcgctctcacccgtccagctggaaaaattgatggattccattcaccgcgtgctgaagccttctgacggactcatagaatttgccgcggaagcgaatccggatgatttgtctccggaaaaattaaaaatcctgaaaaatgccggtgtcaaccggctgagcttcggtgttcaaacctttgaagatgagcttttacaaaaaatcggaagagtgcataaacaaaaggacgtattcacttcctttgaacgtgcgagggctctcggcttcgacaacatcagtctcgatttaatgttcggcctgccgggtcagacgctggccgatcttgacaattccgtcaaaacggctttgtctcttgatgcggagcactattccgtttactcgctgatcgtagagccgaaaacggtgttttataatttaatgcaaaaaggccgcctgcatctcccggcgcaagaacaagaggccgagatgtatgaaacggtcatgaggcagatgagtgaagcgggcatccgtcaatacgagatcagtaactttgcaaagcccggatacgagtcgcagcataatctgacgtattggagcaatgaagagtatttcggttttggcgcaggcgctcacggatatatcagcggcacgcgcaccgtcaacgccgggcctgtgaaacattacatgcagctcatcgaagaaaaggggctgccttaccgtgacacgcacgaggtgacacgtgaggagcagattgaagaagaaatgttcctcggtctcagaaaaatgtccggcgtacaaaagcaagcttttctcgataaattcggacgctcggtcgacgaactgtttcccgatgttctcaaagatttaaccgaaaaaggcctgatttgtgacacgaaagaatcggttgcattaacgcatgagggcaaattattaggaaatgaggtttttggcgcttttttgggtgagttataattgacatttttcttttggtttgttacttttgatatagaattagcactcgctgaccttgagtgctaacaggggtgatgatgatgttaacaaatcgtcagctgttgatcctgcaagtgattattaatgattttatacaatcagcgcagcctgtaggatcaagaactctttcaaaaaaagacgagattacattcagctctgcaacgatcagaaacgagatggctgacttggaggaattgggctttattgaaaaaacccattcatcctcaggacggattccgtcggaaaaagggtacaggtattatgtcgatcatttgctgtcacccgtcaagctgacaaaaaccgatctggatttaattcactcgatatttaaagaaaaaatcttcgagctggaaaaaacagtccaaaaatcagcgcaaatcctgtccgacctgacaaactacacatcgattgtcctcgggccgacgctgagcgagaactatcttaaacagattcaaatcgtaccgatccagccggataaggcggtcgccattctcgtcacgaacacggggcatgtcgaaaaccgcaccatcaatttcccggctaaagtggatttggccgatattgaaaaactggtcaatatactaaacgatcgattagcgggcgtgccgatggacgaactgaatgagcgcattttcaaagaggttgtcacatatttaaggcagcatatcgccaactatgacagcatacttgaatcgctccgctccacattccatccggcggcccacgttgagaaattgtttttcggcggaaagatcaacatgctgaatcagccggagttccatgatattgaaagggtccgctcgctcttatctttaattgaaaaagagcaggatgttctgaagctgtttcagtcatcaaaagccgggatttcaatcaaaatcgggaaagaaaatgactacgaagaaatggaaaactgcagtttaatcacggccacctatacagttgatacgaaacagatcggatcaatcgccattatcgggccgacgcgtatgaattattcaagagtcgtcagcctgctgcagcacgtgacttcggacttgtcaaaagcattcacaagtttgtatgatgaataagggaattttggcaatcattttcagtcatctttttacagcatttgagggaggtgaacacaatgtcagaagaaaaacaaaccgcagaacaggttgaagcagcagaacaagaagaaatgacagaacaggcagaacaagccgcttcacaagagcagcatgaagaaacggcaggtcaggaagaagcccttcagcaccaaattgatgaattgcagggtttgcttgatgaaaaagaaaacaagcttttgcgtgttcaagcagactttgaaaactataaacgacgcagccgccttgaaatggaagctgctcagaaataccgttctcaaaacgtcgtaacggaaatccttccggcgctcgacaactttgaacgggcgttacaggtagaagctgaaagcgagcagacaaaaagcttgctgcaaggtatggaaatggtccgccgccagctgatggacgcacttgaaaaagaaggcgttgaagccatcgaagctgtcggtcaggaatttgatccgaaccttcaccaagccgtcatgcaggtggaagatgaaaacttcggcagcaatattgttatcgaagaactgcaaaaaggctacaaactgaaggatcgcgtcattcgtccttcaatggtaaaagtgaatcaataactacatagcaggaggtaattcaaagtgagtaaagtaatcggaattgacttgggtacgacaaactcatgtgtggcagtgcttgaaggcggagagcctacagtcatcgccaacgctgaaggaaaccgtacgactccgtcagtcgttgcatttaaaaacggcgagcgccaagtaggggaagtggcaaaacgccaatccatcacaaaccctaacacaatcatgtctgtcaaacgccatatgggtactgactataaagtggaaatcgaaggaaaagactacacgcctcaagaggtgtcagctattatccttcagcatctgaaagcatatgctgaaagctacctcggcgaaacagtttcaaaagccgttatcacggttcctgcatacttcaacgatgcagagcgccaagcgacaaaagatgccggtaaaatcgccggtcttgaagtagagcgtattatcaacgagccgactgcagcagcgcttgcatacggacttgataaaacggacgaagaccaaacaattcttgtttacgaccttggcggcggtacgtttgacgtatctgttcttgaacttggcgacggcgtgtttgaagtccgttcaactgccggtgacaaccgtcttggcggggacgactttgaccaagtcatcatcgatcatctcgtagcagaattcaaaaaagaaaacggcattgatctttcaaaagacaaaatggcgcttcagcgtttgaaagatgcggctgagaaagcgaaaaaagatctttccggcgtttcatctacacaaatttctttaccatttatcacagcgggagaagcaggtcctcttcaccttgagctgacactgacccgcgctaaattcgaagagctttccgctcaccttgttgagcgcacaatggctcctgtccgtcaggctcttcaagatgcggatctttctgcgagcgaaatcgacaaagttatccttgtcggcggttcaacacgtattcctgccgtacaggaagcaatcaaaaaagaaacgggtaaagaagcgcataaaggcgtaaaccctgatgaagttgtagcgctgggtgcagcgattcaaggcggcgtcatcacgggagacgtaaaagacgttgttcttcttgacgttacaccgctttctctcggtattgaaacaatgggcggcgtgttcacaaaactgatcgatcgcaacacgacaattccgacgagcaagtctcaagtattctcaactgcagctgacaaccaaacggctgttgacattcacgtgcttcaaggtgagcgcccgatgtctgccgacaacaaaacgctcggccgcttccagcttactgatatcccgcctgcaccgcgcggcgtaccgcaaatcgaagtttctttcgatattgacaaaaacggtatcgtaaacgtaagagcgaaagatttaggcacaggaaaagaacaaaacattactatcaaatcttcttcaggtctttctgatgatgagatcgaacgcatggtaaaagaagcggaagaaaacgctgacgctgatgcgaagagaaaagaagaaatcgaagtccgcaacgaagctgaccagcttgtgttccaaacggaaaaaacattaaaagatctggaaggcaaagtggacgaagagcaagtgaaaaaagcaaacgacgcgaaagacgcgctgaaagccgctatcgagaaaaacgaaattgaagacatcaaagcgaaaaaagatgagcttcaaacaatcgttcaagagctttctatgaagctttacgaagaagcggcgaaagcgcagcaggctgaaggcggagcaaacgctgaaggcaaaaaagcggatgacaacgttgtcgatgcggaatacgaagaagtaaaagacgacgaaacgaaaaaataagttctgtcccgcatggctataggcggaagaacacacatcatattctgattcaacagacagaaagtcaaagtcaggcatctcttggctttgactttttttcttgcccgggataaaaggaattgaaaaaacataattcaaaatgatacaatctaatttatgtgagaaattcgggagagtgaagcgagatgagtaagcgtgattactatgaagtgcttggggtaagtaagagcgcttcaaaggatgaaatcaaaaaagcctatcggaagctttcaaaaaaatatcatcctgatatcaataaagaatccggagcagatgaaaaattcaaagaggtaaaagaagcgtacgaagcgctctcagacgaccaaaaacgcgctcaatatgaccaattcggccatacagaccctaaccagggattcggcggcggtttcggaggcggcggagacttcggcggcttcggtttcgatgacatcttctcaagcatcttcggaggcggcacgagacgccgtgacccgaatgcgccgcggcaaggcgcggatctgcagtatacaatgaccctgtcatttgaagacgcggctttcggaaaagaaacgatcattgaaattccgcgcgaagagaattgcgaaacatgtaaagggtctggcgcgaagccgggaacaaagccggatacgtgctcgcactgcggaggttcaggccagctgaacgtcgaacagaacacgccgtttggcaaagtggttaaccgaagagtctgccaccactgtgaaggaacaggaaaaatcatcaaaaacaagtgttctgactgcggcggcacgggcaaagtgaaaaaacggaaaaaaatcaatgtcacgattcctgccggtgtggatgacggacagcagctgcgcgttccgggccaaggtgaaccgggcgtaaacggagggccggcgggagatctgtttgtcgtattccatgtgcgcgcccacgagttctttgagcgcgacggagacgatatttattgcgaaatgccgttaacgtttgcccaagcggcactcggagacgaagtggaagtgccgacgcttcacggaaaagtgaaattgaaaatacctgccggcacacaaacaggcacgaaattcagattaagaggcaaaggcgttcagaacgtccggggctacggacaaggcgaccagcacattgtcgtccgcgtcgtcacaccgacgaatctgacagacaaacaaaaagacatcatccgcgagttcgctgaagtcagcggaaacctgccggatgaacaagaaatgagtttctttgacaaagtaaaacgcgcatttaaaggcgagtaatgattggataggagttggtagttttgaaatggtccgaaatcagcattcacacaacacatgaagcggtcgaacccatctcaaatattttgcatgaagctggtgcgagcggggttgtcatcgaagatccgcttgatttaatgaaagagcgtgagaatgtttacggggaaatctaccagctcgaccccaatgattaccccgatgagggtgtcattgtcaaagcgtatctgccgatcaacagtttcctcggcgaaacggtggacggcataaaagagacgattaataatctgcttttgtacgacattgatttgggcagaaacacaatcaccatttctgaagttaatgaagaagaatgggcgacagcttggaaaaagtattatcatcctgtgaaaatttctgaaaagttcacgatcgttcccacatgggaaacgtacacacctgttcatacagatgaactgattatcgaaatggatccgggtatggcattcggtacgggaacgcatccgacaacggttctgtgcattcaggcgcttgagcgtatcgttcaaaaaggcgaccgtatcattgatgtcggcaccggttcaggaattttaagcatcgcggccgccatgcttgaggccgaatcggttcacgcgtatgaccttgatccggtcgctgttgaaagcgcgcgtctgaatgtaaaattgaacaaagtgagtgatacggctgaagtgaagcagaacaatttgttagacggcatcacgggcgaacatgatgtcattgtcgcaaatattttggcggaagtgattctccgctttacatcacaggcgtacgacctgctcaaagacggaggccattttattacttcaggcattatcggccagaaaaaacaggaagtaaaagaagcgttggaaaaagccggctttaccatcatagaaattctgtctatggaagattgggtcagcatcatcgcgaaaaaataacagttagtaggtgtcacagcgtatgcaacgatattttatcgagctcacgaagcaggagatggacgaaactcctgattttcaaatcacgggggaagacgtccaccatatagcgaacgtcatgagaatgagtgcgggagaccggattatctgctgttcgaaagacggccatgaagcgttatgcctgctaaaagaggtttctaaagatcatatatcatgcagcattgctgaatggacgggtgaaaaccgtgaactgcctttgaagatcaggatcgcaagcggcctcccgaaaggcgataagcttgaatggattatccaaaaagggaccgagctgggggcaagtatgttcatcccttttcaaggcgccagatccgtcgttaagctagacgacaaaaaggcaaagaaaaagcgggagagatgggcgaaaatcgcgaaggaagcggcggagcaatcgtaccgcaatgaaattcccgaagtgaaaaccgttcatacgttccggcagctgcttgaaatggcggagaatgtcgataaatgtgtcgttgcatacgaggagtcatcaaagcagggagaaacgggcgctttcgctgcggagctcaaaagccttccgcaaggttcgtctcttttaatcgtattcggccctgaaggcggtctgactgagtctgaagttcatcagctttcagaaaaaggcgccgtcttatgcggcctcggaccgagaattttacggactgaaactgcgcctctttacgcgttaagcgcagtttcctatcatacagagttattaagaggtgatcagtaatggcaactgttgcttttcatacccttggctgcaaggtcaaccattatgaaacagaagcaatctggcagctgtttaaagatgcgggttatgaacgaaaagaattcgaacagacagcagatgtatatgtcattaatacatgtacggtaacaaacacgggagataaaaaaagccgtcaagtcatcagacgggcgatccgccaaaatcctgacggcgtcatctgcgtaacagggtgctatgcgcaaacctctccggcagaaattatggccatcccgggtgttgacatcgtcgtcggcacgcaggatcgtgaaaaaatgctcggttacattgagcagtacagggaagagcgccagccgatcaacggcgtcggcaatattatgaaagcacgcgtgtttgaagagctggatgttcccgcttttactgaccgcacaagagcgtcgttaaaaatccaagagggctgcaacaacttctgtacgttctgcattatcccttgggcgcgcggcctgcttcgttcccgcgatccggaagaagtcattaaacaggcgcagcagctggtggatgccggctataaagaaatcgtcctgacggggattcatacgggcggctacggcgaagatatgaaagattataatttcgccaagcttctccgcgagcttgatacacgtgtagaaggattgaagcggatcagaatttcatctattgaagcaagccaaatcactgatgaagtgattgaagtgctggatgcgtctgataaaatcgtccgtcaccttcatatcccgattcagtcaggatcaaacaccgttctgaaacggatgagacgcaaatatacgatggaatttttcgcggaccgtttaaataagctgaaagaagcgctgccgggtctggccgtcacatctgatgtcatcgtcggtttcccgggagaaacggaagaagaatttatggaaacataccggttcattaaagaacataagttttcagagcttcacgtattcccttacagcaaacgcaccggaacacctgcagccagaatggaagaccaggttgacgagaacgtgaaaaacgaacgggtgcataagctgatcgcgctgtctgaccagcttgcaaaagaatacgcctccgattatgaaggagaggttctggaaatcattccggaagaggcgtttaaagagtctgatgaggagggcatgttcgtcggctatacggacaattacatgaaagtcgtcttcaaaggcacggaagatgtaatcggcaaacttgtcaaagtcaaaattcaaaaagcgggctatccgtataacgaaggacaattcgtccgcgtcgttgaggatgaaatgacccgaaacatgcgcatgtcttcataactgataaaaaaaccggtgccttcccgcatcggtttttttacggtttcggaggaatcagcctgtcaatcagccggtaaaacaaatgtgtgaacggcagaaacaataaggcggtgactacgttaaataacaggctgaaatgcgcaatcatctgcgcgggatcatcagacaggcgctccgtaaaacctgctgatgcggacaggaagggaaatacgagcagcacgccgagaatattaaacacaacgtgagcaccggcggtctgtctggcggcataaccgcctgaaacagcagccatgacggccgtgacgcatgtcccgatattagatcccagaacgacgctgaccgcttgttcaatgccgatcaccccttcgttcataaaactcatcaaaatgccgatgcagacggagcttgaatgaatgattgccgtcaatatcataccgataaaaagagcggaccagctcgaatcattcacatgtcgcaatacctccgcccccgccttcatttctgtcagcggaacggcgagccggctgaagcatgtgatgcaaaaaaagatgatgccgagaccgaggaagcttatgccgatctgcctgaacggatatttacggaggaggataaacacaaggcctccgataaaaagcacccaaatgagcacatccatctttatggctaaaaactccgtcgtaaacgtggagccgacattcgtgccgagaatcatcggaatggtccgtttaaaagataaagcgcctgcgctgacaaagccgatgacaatgaccatgaaggctgagctgctctgaagaaaaccggtgaatacgatgcttatgagaaaagctttcaaagggtggtcggtaaataagagcaggctcttctcaatttttgaatacgttaaggcgatcaggccctgcctgagcaggctcattccgagtaaaaaaaccaggataagtgcggtaaagagaatcagtatcatcaaacgaaacacccctttccatcattatatagacaagcagccttattcatgacggaaaagtgagctcgcttagttgacctgactgatggcttatattataatgtcaaagtacatgtttatatatgtatctttttaaaggtagtcgattggtgtattcggagggagggaaagagaatgtcaaaaacggtcgttagaaaaaacgaatcgcttgaagatgctcttcgtcgcttcaaacgcagtgtatcaaagacaggtactttgcaagaagcaagaaagcgcgaattttatgaaaaacctagcgtaaagcgcaagaaaaagtcagaagctgctagaaaacgcaaattctaaaagagggtggatttatgagtcttcttgagcgacttaaccaagatatgaagctgtatatgaaaagccgtgagaaagacaaactgactgtcgttcgaatggtgaaagcttcacttcaaaacgaagcaattaagcttaagaaagacagtttgaccgaggatgaggaacttactgtcctatctcgtgaacttaagcaacgtaaagactccctccatgaattttcaaacgctaatcgtttagatttagtagataaagttcaaaaagagctggacattttagaagtttatttaccgaagcagctttctgaagaagagctgcagacaatcgtaaatgaaaccatcgctgaagtcggtgcgagctccaaagcggacatgggcaaagtgatgagtgctattatgcctaaagtaaaaggtaaagctgacggcagcgtaattaacagacttgtcagcagtcaattatcttaattgacaaaaaagacatctttccttgagagatgtctttttttatacataaaaaaatgaaactaaagtacatttgttacgtatataaagaagaacgaaatgggaaggagggtttatttgccttgttccgaaaaaaaaacggaattgctgttgctctattgggcttatttgtattatctttattaggggttcaattgaacgcgaaagctgatcacccatcggtttatgtcatcccggttgagaaaaatgtcgaacaggggctcgcctcgtttttatcgcgttctttcaaagaagcgaaggagtccggcgcgtcacacattattcttgacatcaatacaccgggaggcgccgttcaatcagccttggatattgcggatatcatcggccgcgcggatgtgcctgttaccgcttacgttaataaacgggcgctttctgccggagcgtatatagcgcttcaggcagatgaaatctatatggcgccgggcggaaaaatgggtgccgcagccatcatcgacggaaagggaaacgcggcagacaaaaaggcccaatcactgtggcatgcagaaatggaggacgcagcggttaaaaacaaccgaaatccgaaatacgccctagccatggcagatcccgccattaatgcaaaggaagcgggcgccccaaagggaaaactgctgacactgacagctgaaaaagccaaggaagtcggatattcggagggcacggtttcagaccttgatgctttatatacaaagctcggttttgacaaagcggatgttcaccatgcaaaagaaggtttcatcggcaaactgggcagatggctgacaaatccgtttgttgtccccgtcttattaacgcttgctttgcttggtttgaccattgaattgttctcgccgggcctcgggataccgggtgccgtcggactgacggccatgctgctgtttttcacggggcatatcgctgccggattcgccggctatgacagcgtattcttattttgcgcgggcttggtttttatccttttagagatatttctgcccggaggcataatcggtcttatcggtattgcaggcgtcatcgcgagcctctttctcgctgcgggcagctttaccgtaatggcggtttctctcttgatcgccattgctgtgtctattacagcctttatcatattaacaagggtgttggggaaacgaatgaaattctttaaaaaattaatattaactgattcaacaagcacggagagcggttatgtttcaaatcagaaccggacggagctgttgggaaaagtcggcgttaccgctacagccctcagaccgtcaggcaccgtcattattgatgatgaacgtctggatgtcgtctcggaaggatcattcactgaaaaagacagacaggtgaaagtagtgaaagcggaaggctcacgcattgtcgtgagagaaatatagatgataaccttgaggaggaattagatggaactgtcaagtttggcgattttagcattagttgctgctgccattattgtgttagccatattcttcacctttgtaccggtgatgctatggatttcggcgcttgcggcaggagtcagaatcagcattttcactttggtcgggatgaggctgcggcgcgtcataccaagccgcgttgtcaatccgttaattaaagcgcacaaagccggcctatccgcaacaacaaatcagctcgaaagccattatctggccggaggtaatgtcgacagggtggtcaatgccctgattgcggcacagcgcgccaatattgagctgtcatttgaacgctgcgcagccattgacctggccgggcgtgacgtattggaagccgtacagatgagcgttaatccgaaggtcattgaaacaccgtttatcgcgggtgtcgccatggacggaattgaagtaaaagcaaaagccagaatcacggttagagccaatattgagcgccttgtcggaggagcgggagaagagacggttgtcgcccgtgtcggagaagggattgtctcgacaatcggttcttcacacaatcataaaaaagtgcttgaaaaccctgatatgatttcgcagaccgtacttggcaaagggttggattcaggcaccgcatttgaaattctttcgattgacatcgccgacgtggatatcggcaaaaacatcggagcgattcttcagacggatcaagcagaagcagacaaaaacattgcgcaggccaaagccgaagagcgccgcgccatggcggtcgcccaagagcaggaaatgcgcgctcgcgtagaagaaatgcgtgcaaaagtcgtggaagcagaagccgaagtgccgcttgcgatggcagaagcgttgcgtgaaggaaacatcggcgtcatggactatatgaacataaaaaatatcgacgcggatacggacatgagggattctatcggcaagctgacgaatgaccagcaagatgaagaccaacaataacctctctattaaggagggagccgctatatgcacgagattctgacaaatccgctcgtcattgccgccgtcatcggcattatatcggcaatattcggcaagaaaaacaaagatgaaaaacgtccgccgggtacacgtcccggaaatcaggcaaaaaagcaggatcaaaaacagccgcagaaagagcataagccggaagcggaagaattgcctgccgtttcagaagagaacccttttgagcaaaaaagaagggaagctgaaaagcgcctagcggagacggagcagatgtttaacgggctcgaacataagctgacatccgcacgcgcacgaaacgcgtctctgaagaaatcagccctcaaaataaataaagaaactgcggtccaaggcattatattcagtgaggttttgggtccgccccgtgcaaaaaaaccgcaccggaccatgcggaacatcggtaaaaaataaagtgttagaaccccttttcaaatcatacatatgagatgaaagggggttctttttttatggggcaaagaaagaatcgtgtaaaggcatggctgacaagagcattggaaattcccccggacgttatgatggatctgcctcgtattacgatggtcggcagacttcatatctacatagagaatcacagaggcctcctgctgttcagtgaagaagaagtcaggctgatgctcaagcaggggcagtgtatcatatcaggaaaaaacttggtcattaaggcaatccttcctgaggaaatccttttggaaggcacgatagatcacgtacgatatgtcgattcataaagccggggggaaataatgtgaaaaacaaatggctgtcatttttttcgggtaaagtccaaatggaagtcaaaggaaaagggattgaacggctgctgaatgaatgcacgagaaacggaatcgccatctttgcggtgaaaaaaaagcaagactgtgttctgctgatgattcagcttcaagatgtacatgctttcagaagagtcatcagaaaacatgaatgcaaagcaagctttacaaaaagaaagggtcttccctttctgcttctcaaatcaaaattaaatctgggcttcactgcgggatttgtgatattttttgttatattgtttcttttgtccaacatgatttgggaaattgatattaaaggggccaagccagaaaccgagcatcagatggtaaagcaccttgaagaaatcggtgtgaaaaaaggccgtttgcaatttttaatgatgacgccggaaaaaattcaaaaatcattaacaaacggcatcgataatattacgtgggtcggtgtggaattgaacgggacagcccttcatatgaaagtggtcgaaaagaacgaaccgacaaaagaaaagtacgtaagcccccgccatatcgttgccaaaaagaaggcggtcatcaaaaggatgttcgtgcaaaaggggcagccgatggcttttgtgaacgatcatgttgacaaaggacagctcctcgtctcaggactgatcggaaatgaagaccggaaagtcgcctcaaaagcggaaatttacggagaaacatggtacaagtcagaagtaaccgtgcctcttgaaacatcatttacgctatatacgggtaaagtaaggacgaagcacaagctgtctttcggatcatggggcgtgcctttttggggcttcgggtttaatgaggagccgctgaaacatccgaaaacagaggaagaaaagcatccgtttcaatttctggggatgaagcttccggtttcttacgtttcagaacagacaagagaaagtgaaacatccgtgcggacttatacgaaaggcgaagcggttcaggccggtatcaaaatgggaagacaagatgtagaaaagcgattaaacggcagcggagaggtggaaagtgaaaaagttttgcaccaatccgttgagaatggtaaagtaaagttgattattctctaccaagttatagaagatatcgttcaaaccacacctattgttcagggagactaaagaatggcagaacatttacttgcgattaatcacaaactgaaaagcccggacgaagcactttctttgttcggcagccaagatgcttttttacatttaatggagaaggatctgggcattagcctcatcacacgcggtgaaaccatttacgtttccgggaatgatgaaacatttgagatcgctgacagattattgggctcgctccttactttaattcgcaaggggatcgagatttcggaacgtgatgtgctgtatgccgtgaaaatggcaaaaaaagatgaactggactattttgaaagcatgtatgaagaggaaataacgaaaacggcaaaaggcaaaccgatccgtgtcaaaaccatcggccaaagagaatatgtggcggcgatgaagaaaaacgacatggtgttcggcatcgggccggcgggaaccggcaaaacttatttggcggtcgtaaaagcggtgcatgctttaaaaaacggccacattaaaaaaatcattttaacaagacccgctgtggaagccggcgagagcctcggttttctgcccggagatttaaaggaaaaagtagatccttatctgcgcccgctgtatgacgcgctccatgatgtgctcggaagcgaccatacggagcgtcttatggaaagaggggttatcgaaatcgccccgcttgcctatatgagagggcggacgcttgacgacgcgtatgtgattcttgatgaagcccagaataccactcccgctcaaatgaaaatgtttttgacgagattgggttttggctctaaaatgatcattacgggcgacgtaagccaaattgacctgccgaaaggcgtcacatcgggacttgcagtggcgaaggacatgctgaaggacgtaaacggcatctccgtgattgaacttgaccagacagatgtggtcaggcatccgcttgttgcaaaaattattgaagcttatgataagcaaaagtaatgcaaaaatgacccgatcccccgttatcgggtcatttttatatgatgtgttcctgatgtttcagggaggaggttcttgttttgaaaaagaagggaaagggcaaaagcgcccgggaacggttccgcagtttcagacatgcccgctcagcccatgtgctgctgtacctgctgctttcagcgatcatgtttggtttgctctttattcatgtaaaacctgaatcacttaatttggatttatttgcagtcagtgataagacgatttacgcgcccgccacagtggaagatcagcaggcgacggaatcgaaaaaacaggcggccgaagatgcggtggaagatcaatacactctgaaaaaaggctataccgacaaccggcttgacctgatcacttccatttttgacagcatcggcgaagtgaaaaaagatgcggaaaaagacaaaaagtcaccttcggaaaaatcactggtaaaatcggtgaaaaacaagctgacacaggatgtcaatgaatccgtctcggaagatgccattaaatcgcttctccatgcaaacaatgaagatttctcatttgtgagggattccgtcattaccgcggtgaatacggtgatgagcagtgaaattccttctgaaaagcttgctgaagcgaaggataaggtcgcaaaagagctgaaaagcgcttctgtgccgtcaaaatatttagcggctgcgactgaaatcggaaaatacgcggtcatcccgaattacgtttttgatccgaaagcgaccgatgaaaaacgccaggaagcgtcagacagcgtccagccggtacagatcaaacagggacaggttctcgtggaagagaatgatctgattgaccgggaagtatacaggaagcttgaactgacgggtcttttgaataattccaacctgttaaaaccgatcagcggtctccttctgatgatcggcctgtttattgccacgcttgtctactattttgagaaacagcagcaggagcttaagctgaaaaataaatctcttttgctgttttctatcattacaacgcttattctcgtcattatggaagtcgtcagtctctttcagaagattgaatacaccaatatcggctatcttgtgccgatcgccgccggcgcgattttaatcaggctgctgctcaatgaaaggctcgccattttaggaagcatcattctggcgatctgcggcagtatgatgtttaatcagggtgtgacgggaacatttaattacgtcatcggcatttactatttaatcagcagcatttcaggcattctgtttttgggaaaacataatgcgagatcaaaaatattgcagacgggactgttcgtctcatttattaatatgattatcgtgctgtcgcttttattaatacaaaatacggcgctgtcaccggttgaaatcggaacgctgatgctgatgggggtcgtctcgggacttgcttcatccgttttgattatcggtctgatgccgttttttgagacgggattcggcattctttcaacaatgaggctgattgaactgtctaatccgaatcatcccctgcttcgaaagattttaacggaaacacccggtacatatcatcacagcgtcatggtggcaaatctgtcggaagcggcttgtgaagccgtaggggcaaacggtcttttagcacgggtcggagcgtattatcacgatctcggcaaaacgaaacgtccgcaatattttattgaaaatcagatgaatatggataatccgcatgacaagctgtctccgcagctcagcaaaaatatcattatcgcacatacgacagacggtgcgaatatgctcagaagctacaagtttccgaaagagcttgtggatatcgcggagcagcatcacggaacgtcccttttaaaattcttttattataaagcgaaagaaaagggcgaccagattacagagaaagagttccgctacccggggccgaagccgcaatcgaaagaagcggctattatctcagtggccgacagcgttgaagccgccgtccgttccatgcataatccgaatcccgagcggatcgaaaaactggtgcggggaattatatccgataagcttcaggacggacaattctcagaatgtgatctcacgttccgagaactggatacgatcgcaaaaacactatgtgcgactttaaaaggaattttccactcccggattgaatatccggaggctacgaagaaggtgaaataaatgggtttactcatagatattgttgatgaaacgaacagcgtctcagctgatgcgctccaagaagtggagaagctgctccaattcgcggcggaaaaagaaggcgttcaggaccaggctgaagtatcggtcacgattgtgacaaatgaggaaatcagagaaatcaacagagactaccggggaaaagacactccgactgacgtcatttcgtttgcgcttgaagaagaaggcgaagacgaggttgaaatcgtaggcgccgacatgccgcctgttttaggagatattatcatcagcgcagacagaacgaaagagcaggcggaagagtacggccattcgtttatgagggagctcggttttctggccgtgcacggctttttgcatttgcttggctatgatcacatgacaaaagaagaagaggaagaaatgttttcaaagcaaaaggatttgctggatgagtatggactcacgagatcataaaaacgagtggagcaggttcctgaagagctttgtccatgcatggaggggaatctggaaaacggcgcggtcagagcggaattttcaatttcatattaccgcggcctgcgccgttatcgtttgcggttttctcaccgggctgagcacagccgaatgggccgttgttttggtgctgatcggaggaatgcttgctttggagctgttaaatacggcgatagagcatgttgtggatttagttaccgatcagtatcacccgctcgcaaaagcggcaaaggacgcggccgccggagccgtttgcgtctttgccgtgatatcgtgtatcattggtttactcatcttcttgccgaagatatgttagcagaagattcttacaattattttacattgccaaaaatgggcgtgaaaaaccaatcataattatgtaaaataaaagtgacagcggtatcatacaggataaaggtaagagaggaattaagtacacatgaacagacaagaattgattgcagaagcattaaaagcgcgggacacagcgtatgtgccgtattcaaatttcagagtgggagccgctcttcttaccaaagacggaaaagtgtacagaggctgcaacatcgaaaatgcggcatacagcatgtgcaactgtgctgaacgcacggcgatattcaaagctgtttccgagggggatacggaatttgcgatgctcgccgtggctgcggatactccgggaccggtttcgccgtgcggagcctgcagacaagtaatttccgagctgtgctcaaaggatatgcttgttattctgaccaacttacaaggacaaataaaagaaatgactgcggaagaattattaccgggcgcattttcatcggaggatttacatgacgaacgaaagctttaaatcaggatttgtatctatcatcggaaggccgaatgtaggaaagtctacctttttaaacagggtcatcggtcaaaagatcgccatcatgagcgacaaaccccagacgacaagaaataaagtccaaggggtgctgacaaccggcacgtcgcagaccatttttattgatacaccgggcattcacaaaccaaagcacaagcttggcgactttatgatgaaagtggcgcagaatacgctgaaagaagttgacttggtgttatttatgattaacgccgaagaagggtacggaaaaggagacgagtttatcattgaaaagctcggacagacgtctacaccggtctttctgatcgtaaacaaaattgataagatccaccctgaccagctgcttcttttaattgatgagtaccgtacgcgctatccgtttaaagaaatcgtgccgatctcagctttggaagggaacaacgtcgaaacccttctcgcgcagattgaagcgtatttaccggaagggcctcagttctatccgagcgatcaggtgactgaccaccccgagcggttcattatttctgaactgatcagagaaaaggtgctccatctgacaagggaagaagtgccgcacagcatcgctgtcgctatcgagtccattaaagggcaggaaaacggctccgtccatgtcgctgccaccattgtggtcgagcgggattctcaaaaaggcatcgtcatcggcaaaaaaggagcgcttctgaaagaagtcggcaaaagagcgcgggctgatattgaagctcttttgggctcacgcgtttacctggaattatgggtgaaggtgcagaaggactggcggaataaaatgtctcagctgcgtgatttcggcttcaaagaggatgaatattaattcatctaaggcgcatgcctgaggtgtgagattacctcacagaagcagggattcgttagcaaaatttgtttaacatgaaaaggaggacatcaggtcaagataagggtaagaatttggatttgcaagctagtttaatgatgaaaggtgggttttttgtgttgaattttacctggaacgtattttctcaaacaggaagtgttgatacgtaccttctttttaaagaactggaaaaagagaacctggaaagacccgaagaaccggaagatgagctagcccgaattgattttccaattttgtaaacctcttggcccctcccattgttggaaggtgcggaaatgctgactaaatgtgaaggaatcgtgctccgtacgaatgactacggggagacgaataaaatcgtgacattgctgacgagggaacacggcaaaatcggcgtcatggcaaggggcgccaggaagtcagccagccggctgtcagcagtcagccagccgtttttgtacgggtcatttttaatgcaaagaacatccggactcggcacgctccagcagggtgaaatgattctcagcatgagaacgatcagagaagatttatttttgacggcgtatgccgcttttatcgctgaactcactgacaaaggaacggaagagaagaaaccgaacccctatttattcgaattgattctcgaatcctttaagaggctgaatgacgggactgacccggacgtgatcaccttcatcgtgcagatgaaaatgctcggcgtcatggggctgtatccggagctgaatcattgtgtccactgcaaaagcggggaaggaacgtttcatttttcgataagagataacgggtttatctgccaccgctgctttgaaaaggatccgtacagagttccgatttcgccgcaaacggcaaggctgctaaggcttttttattactttgatatcggaaggctcggcagcgtctcgttaaaacaggaagccaaaaacgaaattaaacgggtcattgatctgtattacgaggaatattcaggactttatttaaagtcaaaacggtttttagatcagatggaaagcatgaagaaccttttggatgaaaacaaaagttgacattctgcccatctttttatatgatcatttattataaaatatgttgcagtgacagaaagaagtacttgcgtccaactcatacaagcgaccttagggcagtgtaagctaaggatgagcgcgcaacgaaaggcattctcgagcaaccctttaaaaagaggctgagtgattcacatcctcagcaactagggtggaaccgcgggagaactctcgtccctatgtttgcggccggcaagcatagagacgggagttttttggttgccgccgcacttgtaaaagaatggagaaagtggaggtgcttgaaatgaacattcaagatatgattttaaccttgcagaagcactggtcgaatgaaggctgtgtgctcatgcagtcgtatgatgtggagaaaggcgcaggcacaatgagcccgtatacatttttacgaagcatcgggccggaaccgtggagagtggcttacgttgagccgtccagacggcctgcggacggacggtacggtgaaaacccgaacaggctctatcagcatcatcaattccaagtcattatcaagccgtcgcctgataacattcaagagctttaccttgattcattgcgtgcgctcggcattgacccgcttgaacatgatatccgtttcgtagaagacaactgggaaaacccgtctttaggctgtgcaggtctcggctgggaagtatggcttgacgggatggaaattactcagtttacatacttccagcaggtgggcggaattgaatgtaaaccggtatccgttgagatcacgtatggtattgaacgtctcgcgtcatatattcaggataaagaaaacgtctttgatcttgaatggacgtcaggatttactgtgaaagatttatttatgatggctgaatatgagcattccgtttatacttttgaaacatctgacgtggatatgcttttccatttgttcagcacctatgaaaaagaagcgatcagacaaatggataacgggctcgtgcatccggcctatgattatgtgctgaaatgctctcacacatttaatctgctcgatgcaaaaggcgcgatctcggtgacggagcggacgggttatatcggccgtgtccgcaacttagcgagaaaagtggcaaaaacgtattatgaagaacgggaaaaattagggttcccaatgcttaaagaggagggctcttcccatgagtaaacaagacttgcttttagagatcggactcgaggaaatgccggcgcggtttttacatgacagcatggtgcagctcggtgaaaagctgaccgactggctggctgaaaaaaatatcgcccatggcgaagtgaaactttttaatacgccgagacgtctggcagtatatataaaagacgtagcagaaaaacaggctgatattcaggaagaagcaaaaggccctgcgaaaaaaatcgctctggatgctgacggaaactggacaaaagccgctatcggattttcaaaaggccaaggcgccggagtggatgatctgtatataaaagatgtaaacggcacggaatatgtcttcgttcaaaaattccaggcgggacaagagacgaagacacttttaccgcagctggaaaatttgattgccggaatgcattttccgaaaaacatgcgctggggcacgcaggatctgcgctatatccgtccgatcaaatggattatcgctctctttgggaaagacgtcattccgtttgaaatcacaaatgtcgagacgggccggaacacgcagggacaccgctttctcggccaagaagtatctgttgatgcaccgtcatcatacgaaaagctgctgaaagaacaaagcgtcattgctgacccgaaagaacgcaaacaaatgatccaaagccagctggacgcgcttgcggccgagaagaaatggaacattccgatcgatgaggacctgctgaacgaagtcaaccatctggtggaatacccgacggcgctttacggatcttttgaatccgagtttctttctatccctgaagaagtacttgtaacaacaatgaaagagcatcagcgctacttcccggtaaaagatgaaaacgggaatctgctgcctcattttattacggtaagaaacgggaacagccatgcaattgaaaatgttgcccgcggaaacgagaaagtgctgagagcaaggctttcagatgctgcgttcttctacaaagaagaccaaaagctgaacattgatgaaaacgtgaagaaactggaaaatatcgttttccatgaagagctcggctcccttggagataaagtaagaagagcggccgccattgcgggcaaacttgccgtccgcctgaaagcggatgaacagacgcaaaaccttgtgaagcgcgccgcagagatttctaaatttgacctggttacacatatgatctatgagttccctgagcttcagggcgtaatgggagaaaaatatgcgcgcatgctcggtgaagatgatgccgtcgctgccgctgtcaatgagcactatatgccgagagcggccgggggagaagtgccttcaacctttaccggcgcggtcgtggcgttagctgataaactggacacgattgcttccttcttcagcattgacgtaattccgacaggttctcaggatccgtacggattgcgccgtcaggcaagcggcatcgtttccattctgatcgaccgcaattggggcatttcgtttaaagagctgctgtcattgacagaaacggaaaaagaaaatgagctcctcgatttctttacacagcgtctgaaatacgtcttaaacgctgaagacatccgtcatgacgttattgaagccgttctggacagcacagagcttgagccgtatgcagccgttcataaggcaagagtgcttgagaagcacctcggcacacccggctttaaagaaacggctgaatcactcggccgggtcatctccatcagcaaaaaaggcgagagccgcgatgtcaagccggatctgtttgaaaatgaacaggagaaaaagctgtatgacgcttatcaaaaaacaaaagacagtgtcgcggaaagctttgcctccaaaaactatgaacaggcgcttgccgtgctcagcggattaaaggagccgatcgaagactactttaatcacacgatggtaaatgcggacgatgaaacattaaaaaccaaccgtttagcgcaaatgaccgctcttgcagatgtgatcaagtcttttgctaatatgaatcatcttattgtaaaataaagaaaaagacggttgctgtgtgatcggcaatcgtcttttccccttttacataaacatcacagaatgaaaacatagataaagaaacccttccataaaggtggtgagtacgatcgaattaaataaacggcaagaacaaattttacagattgtaaaggaaaacggcccgattaccggagagcatatcgcagaacagctcaatttaacgagggccacgctgcggccggacttggccatactcaccatgtcaggcttcttagaggcccgtccgcgggtcggttatttttatacggggaaaacgggaaatcagctgcttgcggataaattgaaaaagctgcaagtgaaagattttcaatcgatccctgttgtcatcaatgagaatgtctcggtatacgatgccatctgcaccatgtttttagaagatgtcggcacgttatttgtcgtagatcgtgatgctgtcttagtcggtgtgctgtcacgcaaagatttgctgcgggcgagcatcggccagcaggaacttgcctcaataccggttcatattatcatgacaagaatgccgaatatcgccgtctgccggcgtgacgattatgtgatggacatcgccaagtatttaattgaaaaacagatcgatgccctgcccgttattaaagatacggataaaggctttgaggtcatcggccggtttaccaaaacgaatatgactaagatacttgtcagtttatcagaaaatgaaatcatataagcttgaaaactaacggggggataacatggacaatcgcatcatttatgtagtatcagactcagtcggagaaaccgccgaactcgttgtaaaagcctcgctcagccagtttaacggctcagccgatgatacgcatatcagaagaataccttatgtggaagatatcggcaccattaatgaagtcgtgtctctcgccaaagcggacggcggcattatttgttttacgctcgttgttcctgaaatgcgcaaatacctggttgaacaagcggaaaaagcgaatgtgctgtattacgatattatcggtccgctcatcgataaaatggaatcggcttacggtctgaccgctaaatatgaaccgggccgcgtccgccagcttgatgaagattatttcaaaaaggtcgaggcgatcgagtttgccgtcaaatatgacgatggcagagatccaagaggcattttaaaagccgatatcatcctgctcggagtatccagaacgtctaaaaccccattatcacaatatcttgcccataagcgtctgaaagtggccaatgtgccgatcgttcctgaggtcgatccgccggaagaactgttcagcgttgatccgaaaaaatgcatcggcttaaaaatcagccctgataaactgaaccatatacgaaaagaacggttaaaatctctcggcttaaatgacaaagccatttacgccaatatcaacagaattaaagaagagctggagtattttgagaaaatcgtggaccggatcggctgccaagtcgttgacgtttcgaataaagcggtcgaggaaacagcgaacatcattcatcatctcaaaacaaagggccgataactcaggacgctttatcctgggtttttgggtatgcaaatagggaataaacaaaaaggatggcatcttcgcgaagtttgtattataataaaaaattgtgataaaatgtttatttttaggtttaagcttcgtgtgatacgaataaactattatgggtaagatgtcaagaataactcccggaaatttttcgacaaagctcaaaatagatccgcagtcatggagcatatgcgatttcgcttgtttttatgcaggagattgatggagggatggagaattagtcttctaaatgaaaaagaaaagacgatttttgtcgatgcagacgcatgccccgtaaaagaggaaataatgctcattgcatcgcaatacagcgttcgggttattttcgtcgcatcatttgaacactaccagctttccagaagcaaagacgagaactgggtatacgttgatcctcataaagaagcggcagacttatatatcgcaaaccatgtgagatcgggagacgtcgtagtcacgcaggatatcggtttagcctctcttttgctgaacagaaatattgccgtcttatcggaaaggggccgttcttatactgaagacacgattgacttcgctctgatgagccgtcatatgtcaggcaaaatgagaagaagcggcattcattccaaaggacctaaaaaattaaataaagaagatcggaatcgatttgttaccctgcttaaaaaaatcctgtcgaatgatgaagggatttcaaatcaaaacatcgaataatgtacgacggagtgttataagatgggaaaccgcataccagatgaagtagttaatcaggtgcagcagtcagcagacattgttgaagtcataggtgattatgtccaattgaaaaagcaaggccgcaactactttgggctctgtccgtttcacggggaaaacacgccctcgttttccgtctccagcgataagcagatctttcattgcttcggatgcggtgcgggcgggaacgttttctctttcttacggcagatggaaggttattcatttacggaagctgtttctcaccttgcggataaatatcagattgatttccctgatgatataacgattcactctgcatccaggccggaatcttccggagagcagaagatggcggaagcccacgagcttctgaagaaattttaccatcatttgctaataaatacaaaggaaggccaggaagcgttagattaccttttatcaaggggttttacgaaagagctcatagatgagtttgaaatcggctacgcgctggattcctgggatttcatgacgaaattcttgaaaaagcgcggttttgaggaagaactgatggaaaaagcgggtctgctgatcagaagggaagacggcagcgggtattttgaccgtttcagaaacagaattatgtttcccattcatgatcaccacggagccgtggcggctttttcaggaagggcgctcggaagccagcagccgaaatatatgaacagcccggaaacgccgctgtttcataaatctaagctgctgtataactttcataaggcgcgcctgccgatcaggaaagaggagagagccgttctgtttgaaggcttcgctgacgtcatatccgccgtcagctcaggcgtaaaagaaagtatcgccacaatggggacgtcgctcaccgaagaacatgtgaaaatcctcaggagaaatgttcaggaggtcattctctgctacgattcggataaagccgggtacgaagctacgctgaaagcggccggcctgctccagaaagccgattgtaaggtaagagtaagcatgctgcctgacgggcttgatcctgatgattatatcagaacccggggcggagaaaaattccggaccgatatcattgatgcaagcgttacggtcatggcttttaaaatgcagtatttccgcaaagggaaaaacttatctgacgaaggagaccggctcgcttacatgaaagaagtgctgaaagaaatcagcgctctttccgggtcgcttgagcaggaaatgtatgtgaagcagctcgcctcagaattttctctttcggtagaatctttgactgaacagctttccatctacgccagacaaaacgcccccggcgacaaaaacgccgaaccgcagacaagacgggcccgggtgacgacaaaagcgaaacggcgccgtctccgtcccgcctatgagaacgcggaaagacttctgctcgctcatatgctgagagaccgaaacgtcataaagaaagtgattgagcgtgtcggctttgaatttaacattgacggacatcgtgcgctggcagcatacctgtacgctgtttatgaagagggcgctgacatgacgccgcagcatcttatggcgagaatgcaggatgaggaaatcagccagctgctttcagatatagggatgctccaagtaaacgaggagctctcagaggccgagttatccgattacgtaaaaaaagtgttggatcaccgaaaatggtcaatgataaaggaaaaagaagcagaaagagcggatgcggagaggcagaaagacttcgtgaaagctgcgtctctggctcaagaaattgttgcattgaaccgatcattaaagtaacaccaaaaagaggcttgcgttctgattggcaatgattccttgcggaggagcaaatagatcgcttaacctcatcatgaattgtcatttattatccgcagccctgcatgctgaaaaagagagaaggcttccgggtcggataagaaacataccgcttttagaattcgttgcaagctttggaaggagggatccataatggctgataaacaaacccacgaaacagaaacagaacttacattagaccaggtaaaagagcagcttactgaaactggaaaaaaacgtggcgttttaacatatgaagaaattgctgaacgcatgtccagctttgaaattgaatcagaccaaatggatgagtattatgaatttttaggagaacaaggtgttgaattaattagtgaaaatgaagaaacggaagatcctaatattcaacagcttgccaaagccgaagaagaatttgaccttaatgacctcagcgtaccgcctggcgtaaagatcaatgatccagtccgcatgtaccttaaggaaatcggacgggtaaatcttctttctgctaaagaagaaatcacctacgctcaaaaaattgaagagggtgacgaggaatctaaacgcagactggctgaagcaaaccttcgtttagttgtcagcattgctaaacggtatgtcggccgcggcatgcttttcttagacttgatccaagaaggaaacatgggtctcatgaaagccgtcgagaagtttgactaccgtaaaggatataaattcagtacgtatgcgacttggtggatcagacaggcgattacacgcgccatcgctgaccaggcgagaacaatccgtatcccggttcacatggtggaaaccatcaacaaattaatccgtgtgcagcgtcagcttcttcaggatcttggcagagagccgacaccggaagaaattgctgaagacatggatcttacgcctgaaaaagtccgtgaaatattaaaaatcgctcaagagcctgtttctttagaaacgccgatcggtgaagaagacgactcacatctcggtgacttcatcgaagaccaggaagcgacttctccgtcggatcatgcggcatatgagcttttaaaagaacagctggaagatgtgctggatacgttgacagatcgtgaagaaaacgtgctgcgtctccgtttcggtctggatgacggacgcacaagaactttggaagaagtaggcaaagtgtttggagtaacgagagagcgtattcgccaaattgaagcaaaagcgcttcgcaaattgagacatccgagcagaagcaaacgtctgaaggattttctcgaatagaatggaacgggtctttttgatccgttcttttttatgtataagatatatggataatatacctttattttactggataagcatatgttttgcaaatgagtttggaaaaaatgcggcatgtctgaaagggggaaaatgagataagtttatttatattctttattgtaagcgtatacaattcattatacaatagaataaagataattttgtgataaacaaaacagttatttttgctttttgtataaattgtgaaatcaatgaaattgctgagtaagaccatttactttttgtaaaaataagttagaattagaagtgtttacatagggggagaatgaaaaagggggatggagatatgaagtggaatccgctgattccttttttgctcattgcagtgctgggaatagggctgactttctttttagctgtaaaaggcaatggagatgcgcatcagatcgcaagcggcggtgaaagcaaaaatgccgagaaggaaactgcaaacgcttcacctgaagagatttataaagcgaactgcatcacctgtcacggggaaaactatgaaggtgtgtcagggccgaacttaaaaggcgtcggcaaaagaaaagatgtcgctgagattaaaacaaaaattgaaaaaggcggcaacgggatgcccgcgggccttgtgccggccgaaaagctggatgacatggcaaaatgggtttctgacattaaataaagctttaccggtccctatataaaagacatatgaaaaactctatccgccgcttggattccgggcggtttttttatatgatagtaaaggaaaaagaacctgagaaaagttgtgatattgtgaatgaaatgaagttatctaaaagattgcagtctgtggcggaatatatccctccgggtgccctggttgctgatatcgggtcggaccacgcgtatcttccttgctatgccgttttgaatcatttggcaagccgggcaatcgccggtgaaattacagacggaccgtttctatccgccaaacagcaggtggaaaaactggacttaagcactcttatctccgtaaggaaaggtgacgggctgagcgtccttgaaaaaggagaagccggcgccattacaatcgctggcatgggcggagcgctgatcgctcatattttggagtccggaaaaacgaaattgacggggcgtgaacggctgattctgcagccgaatattcatgccgttcatataagagagtggctgtatcaggaaggctatgaactgattgatgaagtgattctcgaagaagacggaaagtgttatgaaatcctcgttgcggaaactggcgaccgtgatgcgccgtatcgggacgtgccgatggctgccggaatgcttgcgggtccgtttttattaaaagagaggaatgaagtgtttcttcggaaatggagccaggaacttaagcatactgaacaaatttatgaacagatcagccgcagcgcaaagcatgaaagtcatgaaaaattagctgaattgaaagagcggatttctctgctgaaggaggtaatcggacatgcctaaacatgtaaacggacaggaaatcatccagctgtttgaacaattttcaccgaaggcttttgcggtggaaggagataaaatcggcctgcagatcggtacattgaataagccggtgaaaaatgtcatggtgacactggatgttctggaacaaacggtagatgaagccattgagaaaaaagttgacttaattatcgcccaccatccgccgatttttcggccgcttaaacagatcaccactgatcagcctggcggaagactgattgagaaatgtataaagcatgatattgccgtatatgcggctcatacgaatcttgatgtggcggacggcggtgtgaatgatctgcttgccgaagctctcggcctgacagacacagaagtgcttgtcccgacatattcggacccgatgaaaaagcttgccgtctatgttccgaaagactatgaagaagctgtaagaaccgcacttggcaacgccggagcgggacatatcggcaattacagccattgcgcgttctcctctgagggaatcggcagctttaagccgctggacggggcagaaccgtttatcggacagacgggagaactggagctcgtccatgaagtgagacttgagaccgtttttccggcaagtatggagaaaaccgtcgtaaaagcgctgaaaaaaagccatccgtatgaagaggtggcatatgatatttatccagtggagcagtctccgcttgaaaaagggctcggccgcatcggaaaacttcagcaagacatgacgcttgaagagtttgcgctgtttgtgaaagaaaagtttgacgttaacggagtccggatggtcggagagcgaaacagcaaggtgaaaaaagtcgcggttcttggcggtgacggaaataaatatatttatcaggcaaagcggaagggtgcagatgtttacgtgacgggcgatctttatttccatgtagcgcatgatgcgatgatgatgggattaaacgtcgtggacccggggcattatgctgaaaagatcatgagaaaaggcacggctgagaagcttacggcaatggccggggagaaaaactatgatgtgcgcattttcgcttccgaaacagatacaaacccatttactttcttataaaaaaactgaggccccgggcctcagttttttatttttactttcggaaggatttttttaagcggcacactgtgttcaagctgccatgtcgattcatcgttgtggtcaaactgctctaaaaagcggatgacttcctttgtaatcggtgtcggtgttgatgcgcctgcggtaacggcgacggtattgacgtctttcagccattcgagcttcagttcactgatgtctccgattcggtaggcttttgttccggcgatttcttctgacacttgcgccagtctgttggagttattgcttttcggatcaccgacaacaatggttaagtccgctttttttgcctgctctgatacagcttcttgacgaacctgtgtggccaggcagatttcctgatggtattccacgtacgggtacttttctttgactgattccataatatcgtggacgtcccactgggacattgtcgtttggtttgtaacgattaatttctcagcctgaatatcgagatttctcacgtcttcctctgtttcaacgagatgaacgatttcaggagcgacgccgacggctccttcaggctcggggtggccttttttaccgatgtatatgacgtgataaccttcagcttttacttttcggattaagtcatgtgttttcgtgacgtccgggcatgtggcgtcaatcgtaacaagccctttttcctcagcggcttttcttacttccggagataccccgtgagccgtgaaaataacggttcctttttccacctgctttaaaatctccagacggtttgtgccgtcaagcgtgtaaatgccgtcttcctcaaacgcatctgtgacatgcttattatgaacaatcattccgagtatatatataggtcttggcagtgttttatcgagtgacgcgtttttggctatgaccatggcatcaacaacgccgtaacagtagccgcgcggcgatattttgataacgtccaatgtagatgtcctcctatcaaaagtgagtgtagaggcaatataaaaagccgtagttaaacggctcaaatcttgcattcttctgatctcattatagctaatctttcgtgagatatcaaagaatgttaaatatataatttcggctttgatctgcccgatgttctttttggacgcggctgttccgctgagtctgcctgtgcggcgtctttttcttttgaagcggatgctttttcagacgtcttctttgatgttttggatgaggcgtctgatttgttttcatcttctgtttcatctgttttttcagcttcatcctttttgtcctgttcgtctgtttctttcgtctcgtcagattcattctcgtcatcactgctgcttaattggctgtaaagcttcatcatggcgggcagactccgtactaaaggaccgtactgctggatcatcggcgtaacctgctgcgccacgccgagcaccttctgaacgttgccgagcatgctcgacagggatgccggacttgccaggttctgtattccctgcagtcctgcacctgctcctccgctggccgccgccggtgccgacgcggcagcgcttcctcctcctgaaccgggtaaaaaacgggaaagcataccttttaagccccctccgccgcccgtgcctgcgtttctcaggcccgctccggcaatctgctgctgagggaaaagctgccgtccctgctgcatcagctgccgtcccggcaatgacggtcttcctcccatcatcatacgcggattcataaacggccggccctgctgcgccatatttctcatcggctgctgtggaaacatacttgtacctcctttctgtctctctgctattacaatatgcatcggagggggcatttgcttttctgtctcgaaaacaggattcccccaagacatggtgtttttaagtaaaatcggttataatgtgatgatggacacagaatgtgccgctttaaggagctgggaaaaatgaaagaaactaaatttgatggatacaacttaaaaccgtttattatagatgcagttcaccgccttggtttttatgaaccgacagatattcaaaagcgtctgatacctgctgtactgaaaaacgaaagcgtgatcgggcagtcccagacggggacggggaaaacccacgcctatttattgccaattttgaatcggattgatccgggttctgatacggtacaggctgttattacggcgccgacgagagagcttgccaatcagattcatcaggaagcgctcaaaatcacacagggtgcggaagatgagccgatccggacaaaatgcttcatcggcgggacggacaagcaaaaatcaattgataagctgaaaacacagcctcatctcgtcgtcggaacgccgggccggatcgcggatctgattaaggcgcaggcattgaacgtctataaagcgcagtctctcgtcattgacgaagctgatctgatgcttgacatgggctttttagaagacgttgattacatcggatcccgtatgccggaagaacttcagatgcttgtgttctcagctacgattccggaaaagctgaagccgtttttgaaaaagtatatggaaaatccgaagtacgcgcatgttgagccgaaaagaatcacagccgaaaagattgaacatgttttggttccttctaaacagcgtgataaagacaaactgctttttgatatgatgtctcatctgaacccttatctgggcattgtgtttgcaaatacgaaaaacacggctgaccatattgcgaaatacctgactgaaaagggcatgaggattggtcttctgcacgggggattaacgccgcgtgagcgtaagaaggtaatgaagcagattaatgatctggaattcacttatgtcattgcgacagaccttgcggcaagaggaattgacattaaaggcgtaagccacgtcatcaactatgagcttccggacgatctggatttttatgttcaccgcgtcgggagaaccgcacgcgcgggttcatcaggccaagcactgaccatttatgagctttctgacgaagatgcgctcgtaagactcgaaaagatgggtattgtgtttgactatgcggagcttgtaaacggcgaatggaagaaaggcgatgaccgccaccgccgcaaaaaacgcaaaaaatcggagaatgaggctgaccaaatggcgaagcgcctcgtgaaaaaaccgaaaaaagtgaagccgggctataaaaagaaaatgagctacgaaatggaaaagataaaaagaaagcagagaagaaacaaatctaacaaaggaaagtaggggaatcgggttgctgaaaataggttcacacgtctcaatgagcggaaaacatatgctccttgccgcaagcaaggaagctgtttcgtacggggcgaacacatttatgatctatacgggcgctccccaaaacacgcgccgcaaaaaaattgaggacttgaatattgaagcgggccgcgcccatatgaaggaaaacggcatcgatgagattgtcgtgcatgcgccgtacatcattaacatcggaaatacgacaaatccggcaacatttgagctgggcgttgattttctgcgttctgaaattgaaagaacggcagcgatcggcgcgagacagatcgtgcttcatccaggggcgcatgtcggagccggggctgagacgggcatcaaaaaaatcattgaaggtttaaacgaagtgattgttcccgggcaaaacgtgcagattgcgctggagacaatggcgggcaaaggatcagaatgcgggagaagctttgaagagctggccgagatcattgcgggagtcacgcataatgaacatctatccgtctgctttgacacttgccacacccatgacgccgggtatgatgtcgctaatgattttgacggtgttcttaacgagtttgataaaatcgtcggcatcgatcggataaaagtccttcatgttaacgacagtaaaaatgtcaaaggcgcccggaaagaccgccatgaaaatatcgggttcggagagatcggttttgacgctctgcagtacatcgttcatcacgagcagcttgccgatatcccgaaaatcctcgaaacaccgtatgtaggcgaagacaagaaaaataagaagccgccgtaccgttttgaaatcgaaatgctgaaagaaaagcagtttgataaggagcttcttgaaaaaatatcagctcaataagaaagaaaggaggggcgggtgtccctccttttttaccctgagaattgattgaaaagttcgtcaactttccgcgccgtttcttttgaagttatcgtttccacttttttcagcaggcgcagccgctcctgttcatcaaaaatattgatgttttttccgtgcatcagagccgctacctcagccgcttgacttcttgtaatgctgatcccgtattgcttggaatatttcagcagatcgtccgcagtgacttgattgagccgctgcaaaataattctttgtattaaaatcatcgatactttcacctctttagacataatgtattgagcagatcattaaaatgttacagcttttaatggtaaaataaagttgcttactgtttaaaatagttattataggaaaggagattttatgaccccaaataaacagcataaaagagaatcatttttacactttatcttcagggtcattatgattctgatcggggcgggttcagccgccgtaagtattgaattgtttctggtccctaataattttatcgacggaggcattatcggtgtttcattaattttagaccacctctttatgtccaatcccctcctcaattttgccttattcgttgtgttactcaacattccatttatgattttcggatataaatatatcggaaaaacatttctcatctctactgttatcggaatcgtcggtttagcgctgattgaatcctcattgcaccatgtggaggccattacgacccagcctattttggcgacggtattcggggggcttttgctcggtttcggggtaggccttgtcatccgaaacggaggctcgatggacggtactgaaatcctcggtatccttctcacgaaaaagctgcccttttcagtcggggaattcgttatgctcatcaatgtgtttattttcatttgggccggttttgtgttcggtccggagcaggcaatgtattctttcatgacttattatattgccatgaaaacgattgacgcggtcatccaggggcttgatgaaacaaaagcggtcattattgttgcagagcaatatgctgagatctcagatgcaatattgcaccggcttggacggggaaccactaagcttcagggaaaaggcggatatacggatgaaaccaaagaagtcatttacgcggtcgtgacaaggcttgaagtgactaaattgaaatccattgtgtttgaaattgataaaaacgcctttattacaatcatgaatacccatgaaacgaggggcggtaagttcaaaaccgcgattcactaggctttcatttacttttcatcattttataggtataatttgatacatcataagaaaatggcctgctgttcagacagctgccattttctttttggagcgataccgtgttgtaaaggggaggtcctcatgaacgtacaagaagcgttgaacctgctgaaagaaaaagggtataaatatacgagtaagcgagaagacatgctgcagctttttgctgattctgataaatatctgaccgccaaaaacgtgcttgccgcattaaatgacgactatccgggtctgagctttgataccatatacagaaatctttcgttatatgaagaactcggcattttggaaacgacggagctttccggagaaaaactgttccgttttacatgctcttatacccatcatcatcaccattttatctgtttaacctgcgggaaaacgaaggaaattgagtcctgtccgatggataagctgcacgatgatttggaagggtatgaaatcagcggccataagtttgaaatttacggcacctgtccggcgtgccgataaaaaacctcctgcttatacaggaggtttttttcagcttttaacatgctgaaagctgtgtttgtttttattaatccaggcgacggcttcaagccaattctgcaccctgataatattggaatcgatggggagctgattatatggggagttaaaaaggataaccggaatgcctgcttcttttgcgatcattgtcgcattgccgtggtgatcttcgaaaaataaatcaatgccgtgttttttgacggcttccactttgtgatggcctccgacaagctcaatgtgatcgtaatgaatgtcccggtttgcaaaccagtccagtgtaacatcttctaagtggccgcgtcttgccgtaatgtagatcagacggtgctcttctttcagtccgtccagtgcctgcttggcaaattccgcgagcttcgcttctttatatatggctgcttcatgaacgttcatccattcccaaaattcctcgtctgtaatgttcaaaagcttcgtcagatcataatcagtcatatcatccaaggtaatggaaagatgaaatgagcggtttaaataagggacaaatgtatcctgtgccgtaactgtgccgtcaatatctatacctaaccgtaacatgtccacactcctataaattcatcccttcaagtgtaacataaacaattaacaataccagaaaagtttagcaaacatgaattcgtaaaaaacgcggaaactaaaaaagctcctttcataaaagaaaaagggggaattgaaggtggcatacgattacgaaaatcgaaaaggcaacgactactacgtggatcatggatcggaaggaaccgatatcacgcgtgatgtttattcagaagaaacagcggccgaaatttcagagccatatcgtgcttctgaccgggcagcagaccgtgatgataatcgggacggagtaagtgaaggccgggggatagggtatgcagcattggctatttctatcatttccctgtttgtgctccctgttttattaggggcatgcggcattatcgtcggctatatcgccagaagaagaggagcaggcgctttaggcggatgggcgatgggaatcggtattgtttcccttgtgctcggcatcttcattacaccgtttttttaacacaacgcaaaaaaagcttggcggaatatccgtcaagctttttgtgtttcttgttctgcttttgctttttccgcttcaagctttgcgtagtgttcttctgccagcttgtcgatttcttttttcagctcttcgaccatggtttcttcagggactttgcggacgatttggcctttgcggaaaagaagtccttcgccgcgcgcgccggcaatcccgatatcagcttctcttgcttcgcccggtccgttaacggcacatccgagaacggctactttaatcggcgctttgactttagaaatgtattcttccacttcatttgcgatgctgatgagatcaatttcgatccgtccgcatgtcgggcatgaaataagcgtagccgcgtttgaagcaagaccgaatgatttcagcagttctctggctacttttacttcttcaaccgggtcggcgctcagagagatccggagcgtgtttccgattcctttgcttaaaatcgctccgagtccggccgcgctttttaccgttccggcaaacagagtgcccgattctgtaattccgaggtggagcggataatcaaatgcttttgaagctttttcgtatgcttctatggctagattgacgtcagacgctttcatgctgacgatgatgtcgtgaaagtcaaggtcttccaggattttgatatgatgaagcgcactctcaaccattccgtcagcagtcggatagccgtatttttctaaaatgcgtttttccaaagaacccgcgtttacgccgatccggattggaattcctttttctttcgctgcttttacgacggcttccactttttcgcggcggccgatgtttcccgggttgattctgattttgtcggccccgccctcaattgcttttaatgcaagcttgtagtcaaaatgaatatcgacaacgagagggatggaaatttgttttttgatgtcggcaatcgcgttagcggcgcgttcgtccggacatgccacccggacaatttggcagccggcttcggctaaacggttgatttccgcaactgttgcttctacgtcgtgtgttttggtcgtcgtcatactctgaatgacgacttcgttatttccgcctattgttaaaggtcccactttgacgggacgcgtttttgtacgatgtgtgatttcactcacttgtcaatcgctccttaattgtagttaccgcttttgcaggctgagccttttacatgtcaggcaacttctatttacatgttatattgtaacagtgtatttgccgaactgacaagaaattaacgtttaattgcggtagacggggaatttataagcggtgcctgcctgaattgcgtttgcttttacattcggattcagcgcttcaaaatcttgcgcaatatcatctggcgctttatgtgcgccgactatcgacatcaccgtatcgccttttttgaccgtaaccgttctgtatgaagattcctgtcgggctggctgtgctgccgctgcgtatgctggaaggtcttgagaagggatcgtgccgattttaagatcgtaaaagataatgaatatcacaaataaactgccgaatacaaaagtaagccgcttcattccaaccgcctcccgcatacatttttacttcattgtatgcttgtcccattttgttcatgacaaaaaagaagaccgccgggggcagtctttgttacacagctgtttttctaggcggtatctcttttaagacgaggaaaaggatgataaagtttacaaaccaattcactaaaaattcactcggcaccgtaataacaagcgcgcgcatgattgtaaagaatatggtcgaaagtgtaatggaataagccgaaagcttccagagctgctggtaattcaatgtctttctttgcgcatttttcaatatcagtccgatgacggcgagaaatgatacttcaatgaattttccggccgctgtcatgatgaacagcaaaacggacaggacggtgacgatcattgttttattttggtttaatgctgatatgatttctttttttgtgatatcagcaggcatcagcgaataattcatttctgtcgcctgtccgtctacagcaagcaccattttatttttcaaaatgccgatcgcattttgtttcgccgctatttgtttcgcgccgtaagcatctgtcggatcaaacacgatgacgaacccgttcgcttccgtttccttagaggcggacgctttcgtctgcaattctccgtttgaaatgctgaaatcagggaaatctttctttaacacggttttgaaaccgttcattgagtttacggtgccggagcaaaggtaataagcgcttggcagcgtaaaaaggacagacagcaaaaatacataaaggatcgcttttcctatcccctgaaaccgtgtttttgcaatatctgccggagagtatgtacttttcaataaagccgtaaatatgttcaacatcttcacttcctagcctaaactggtatatgttgcttattgtatcgttcacaggggatgaacacaagtgagagtatttaaagcggtgataaggaatcatacataataagataaagcgggaagctgtgatcgcccgcaaaacaaaggatggtgtttttgtcatgagtgttttgtattggctgatgatcattgcggtcttcgtcattgcttttatcggacttgtatatccagtgattccaagcgttatttttattgtggccggttttcttctctacggatttttgttttccttcagtccttattcttacctgttttggctcattgaggcggtatttgcggccgttttattcgcagctgactatgtgtcaaatttacttggcgttaaaaggtacggaggaagcagggcggcaatctggggaagcacgatcggattattgttcgggcccttcgttattcccgtggcaggcattatattaggcccgtttatcggtgctctctgcgctgaggtgtttgttcatcaaaaggatatcaagtccgcggcaaaagtggggctcggctcgttaatcggctttttaacaagcgtggcggcaaaaggcgtcattcagctctttatgatcgggtatttcttatggacggtgctttagaaaggtttaatttcggccgtgaacggataaagtgtaatatgtctgctggaatcgccggattgtgagctttttcattgattaccacgctttcttttgttacattgagattagaaaagttcgcgttaagcggcatttcagtacatatatttaaaggaggaaaaaattatggcttacaaacttccagaattgccttacgcttatgatgctttagaacctcatatcgataaggaaacgatgacgattcaccatacgaagcaccataacacatacgtgacaaacctcaacaaagcgatcgaaggatcagcgcttgcagagaaatctgtagatgagcttgttgctgatttgaacgcagtgccggaggacatccgcacggcagtccgcaacaatggcggcggacatgcaaaccactctttattctggactcttttatctccgaacggcggaggcgaaccgactggtgagcttgctgaagagatcaaaagcacgttcggaagcttcgatcaatttaaagaaaaattcgccgcagcagctgcaggccgtttcggttcaggctgggcttggctcgttgtaaacaacggcaaacttgaaattacaagcacgccaaaccaagattcaccgctttcagaaggtaaaacacctgttctcggtcttgatgtttgggagcacgcgtactacctgaactaccaaaaccgccgtcctgattacatttcagctttctggaatgttgtgaactgggatgaagttgcccgtctttacagcgaagcaaaataattgagttgaatgatcacaaggtctcccgcgggaggccttgtttttttattgactttgattccttttacatatctcagtttgagtgagacaaactaatgtgtagtaaaggggagtcaatgatgagcaaaataaaaaaaattatcggcgacatcgaaataaataaagggctgctgctgttattgacgattggcggcctttactcattgggcatcgcgctgtcaaatacatttgtcaacgtgtatttgtggaagcagtcgggaaaatttattgatttggccatatacaatttgtcggtcgtaacgatgcagccggttacctttctgctggcgggccggctggctaaaaaaattgacagggtgtttattctaaggttcggcgttatctttttggccgctttttatttaagtgtgctgcttgccggagaaactgcggcttcccgtctcgttttgataggggccgtgctcggagttggatacggcttttactggctggcttttaatgtgctgactttcgaaatcacggaaccggaaacgagagatttttttaacgggtttttaggcattttgtcttcatcggcgggcatgatcggtccaattgtggccggatatgtcatttcaagacttgaaaacaatacgggttatacaatcattttcagcctgtcgctcggcttatttgcccttgccgtggtcatgagcttttttctgaagcggagggagtcgaaaggccggtttatgctgaaaaaagtttttgatgagcgccacacgaatctgaattggcgccggattaccaacgcgcacttttttcaaggcttgagagaagggatttttgtttttttaatcagcgtatttgtattcattgcgacaaacagtgagctggcgctcggaacattcggtctcgtcaattccgcggtttctttttttgcctattattttgcatcaaggctcatcaaaaaaagagcgcggaaaaaggcgattcttatcggcggattgatcttgtacggcgccctgtttctcataatttttaaaatgagcttcacgacgctccttttgtacggagtgtttattgcgatcggctatccagttcttctcgtgccgtatgtctcgcttacatacgatgtgataggccgggcgcggcttgccagaaaagccagaattgaatacattgtgctcagggagttatttttaaatgcgggccggatcgtttccatcctttgtttccttgtcatcgttacattgttcaaggaaaaagtgggaataccggcggcgctcgtgctgctcggagccgggcatccgctgatttattactttataaaagacatcaaactggacacggaaacttctgatgaaacagtggaagaagaccgacaaaaacgggcggcggaaccgaattttataaaaggagaaagataaaagggttatctgtagaaaaatatcgaaaaaacctttagaatgaaaaatggcacctgaacagaaggtgtcatttctttctgtaaataagaaaaggtgatgtcatgaggagaaataaaaagaaaatagctgtaaacaaagaaaagaaaaaatcactgccgatccggcttaattttttgtttttggctgcgtttcttattttcacttggattatcgtcgagcttggcatcaagcagatcgttcagggtgatgattataaaaacgccgctaataagcaggaggagtctgatgtcagcacggcggttccgagagggaaaatttacgaccggaacctaaatcccatcgtaacgaataaagcattaaatgcgattacatatacacgttcagcctcaaccacccaggcgcagcgtttgaaaatcgcaaaaaaactgtcgggtatgattaaggtaagcaccaaaaaggtgactgagcgggataaaaaagactattggatgttaacgaggcctgatgaagcgaaaaaactgattacggccgaagaaaagcaaaaagctgaagacaaaaaactgtctgacgatgatttatatcagcttcagctgaaacgtatcacagacaaacagctgaatgagctcacttcaaaagatatgcagatccttgcgatcaaaaggcagatggattcaggctactcactgacgcctcaatacatcaaaaatgaaggggtgtcggcaaaagaaatggccgtcgtcagcgaacatttggatgaactgccgggagttgacgtgacgtctgactgggaacggtcttatccttataaaagcctgatccggacattgctcggcagtgtatccagttcgaacgaaggtcttccgtccaacctgctggatcactatctgtcacttggctacagccggaatgacagggtcggaaaaagctatttagaatatcaatatgaaagcctgctgcagggtcaaaaagagaaagtgcagaacttaaccgactcatccggaaatgtcacgggcagcaaagtgatttcaaaaggacaggccggcaaagaccttgttttatccattgatatggacctgcagaaatccgttgaaaaaatcattgagaaaaatttaaaatcggcaaaagcgagaccgagcacgaagcttcttgatcgggccttcgtcgtcatgatgaacccgaaaaacggagaagtgctgacgatggccggcaaacagattacgaatgaccatggaaagtacaaaattaatgattatgccctcggcgcaatgacttcctcctacgcaatgggatcggcggtcaaaggagcgacggtgttgaccggactgcagacgggcgcgattaatttgaacaccgttttccaggatgaacctatgtatttcaagggaagtaaaaacccgaaaaaatcatggacgaatttaggtcccgtagatatccaaaaagcgcttcaggaatcatcaaacgtgttcatgttcaaaacggcgattgccgtcggtaaaggggagtacaaaaaaggccagtccctgccgcttgatatgaaggcattcgatactttcagatactacttcaatcagttcggactcggagttaagacggggattgatcttccgaatgaagcgaccgggtaccaagggtcacagcgaatttccggtcttctgttagactttgccatcggacagtatgatacgtttacaccgctgcaaatggcgcagtatgtatctacaatcgccaatggaggctatcgtttgaagcctcagcttgtaaaagaggtcaggcagcctgattcgaaaaaaggaatcggagccgttgtagagtctgttcagccccaagtgctgaacaagattgatatgaataatgcagacattaaagaagtgcaggcaggtttcagacgcgtcatgacaaaagggacagccgcaactgattttgcgactgcgacttacagtcctgccggtaaaacgggtaccgcgcaatctttctatgacggtcctgacaaatcagagacgggtgaagcaacatataacacgactcttgtcgcgtatgcacctgctgataatccggaagtggctatttctgtagtcgttccttgggcctatattaattacagcgatcgatattcgattacggatgatataggaagagcagctctggacaaatactttgagctgaaaaagaagcaagaagataataatacgaagcagaaaaacgaagataaaattcaggaagacgctgaaaacggcaatacaaacaactaatagaaaaacgctcacaatctgtgagcgttttttttatacaaaaaaacatccggatttacaaaaccttaacacttgatttatacgcattttacaagaaccctttactctagacctgtaggacaaattacacattaaatgcagggggaattcaggaaatgaaaaaaaacaaatggatgcttatgcttctgatggctgctgttatgattgttgctgcagcatgcggaaatgcaaaggaaagcggcaagacagacagtcaatctgcaagtgaggataaaaaagcatcaggttctttaaccatttctggttcatcagccatgcagccgttagtactggcagcggcggaaaagtttatggaaaaacatccggatgctgatgtgcaggtgcaagcgggaggttcaggaacaggtctttcgcaagtgtctgaaggggcagtgcaaatcggcaactcagatgtctttgctgaagaaaaagaaggcattgatgcaaaagccctaaaagaccaccgagtagcggtagtggcgatggcggctgcggtcaaccccggtgcgggcgtaaaggatataaccaaaaaacagctgacagacgtctttacaggaaaaattaaaaactggaaagagcttggcggtaaagatcaaaaaattacactcgtgaaccgtcctgattcatcaggaacacgcgctacgttcgtcaaatacgcgcttgacggagcagatcctgctgagggcattacagaggattcctccaatacagtcaaaaaaatcattgcggaaacgccgggagcaatcggttatctggcattctcttatataaacgatgacaaagtaacgcctttatcgatcggaggcatcaaaccggaagagaaaaacgtcgtcacaggcgagtatccgatttgggcttacgagcactcttatacgaaaggtgaagcgtcaggccttacaaaaacgtttcttgactatatgaacagcgatgaagtacagaaaagtatcgtaaaagatcaaggttacattccgatctctgatatgaaagtcacacgtgacgcaaacggcaagcaaagctgaggggagggcgggctccccgcctcttcttccttataggagtgtaaacaaatgataaatcacagagaaaaagagtctgtaagcgaacgcttaataagctcaaaacaaaacaggcaaatggatgaagtccgcggaagggtgattgtgtctgtgtgtgccgcgattatcattgcggcatcagcggcgatcacaatttttctcggcataaaggggctgcaatctttttttgtaaatggtgtaagcccgattgagttcttaacaagtctgaattggaatccaacccaggcaaaacctgagttcggcgcgctgccttttattttcggatcatttgcggtcacggttctgtccgctctgatcgcagcgcccctcggtattgcgggtgccgtgtttatgacggaaattgcgccgacttggggaaaaaaggtgctgcagccggtaattgagctgcttgtcggcattccgtccgtcgtttatggattcataggtcttacagtattggttccgtttatcggctcttttaaatcaagcggaacgggtcacagccttctggcggggacgatcgtactctcggtaatgattctgccgactgttacatcgatttccgctgatgcgcttgcgtcacttccgaaacaccttcgcgacggttcatatgcgcttggtgcgacgaggtggcagacaatcagaaaggtgcttatcccggcggcgtttccgacattgctgaccgctgtcgtgctcgggatggcaagagcgttcggagaagcactcgccgtacagatggttatcggaaatacaaagcttctgccggaaagcctgcttgatacggcgggaacattaacgacgattattacgttaaacatgggccataccacatacggcagtattgaaaataatacgttatggtctatggggcttgttcttctcatcatgtcgtttctgtttatattgctcatacgctacttgtcgtctaggaggaaagtgtaatgaaccggaaaataacggataaattggccaccggtgtattcgggttatgcgccgctgtaattgcggcgattttggcaggattgtttttgtacattcttattcacggcgtctctgaaatctccttgcattttcttacgtcaaaatcgagcgccattgcgtcaggcggcggaatacgggatcagctttttaattccttttacattctgtttatcaccatgctgatcacgataccgcttggtgtggggggcggcgtctttatggctgaatatgcgccccaaaataaaatcactgattttatcagaacgtgtattgaggttctgtcttcgcttccgtccattgtcatcgggatgttcggcatgctgatgtttgtaaacctgaccggatggcgctacacgattatcggaggcgcgctcgcattaacggtctttaaccttcccgttatggtccgggtgacagaaggcgcgctcactgcagttcctaaggagctgaaagaagcttctctcgctttaggcgtatcgagatggcataccgtcaaaacggtgctgattccgagtgcgattccttcgattttaaccggagccattctcgcatcaggaagagtattcggagaagcggccgcattgttatttacagcgggactgacaacgccgcggctgaattttacggatttgaacccgttttctgaatcatctcctttcaacattttcaggccggctgagacgctggcggttcatatatggagtgtcaatacgcagggaatcatccctgacgccgaagcgattgcaaacggcggctccgcggtgctggtgatttcggtgctcttgtttaacctttgtgcaagatggctcggatctgtcatttataaaaagcttacggcaaattaatcggaaagaggcgaaaacatgattgatcacatcatcagggaacaagcggaacagacaaagcgttcgccggagtcttcaattttggaagtgaagcatttatcaatttattacggtgacaaacaagcggttaaagatgtaaacatggatattgaaaaacatgcggtgacggctctgatcggtccgtccggctgcgggaaatcaacatttttgagacagattaacagaatgaacgatgccatcccttttgcaagaagcgagggagagatcctttatgaggggctgaatattttgggggaagcgattaatgtcgtgtctctcagacgggagatcggtatggtgtttcaaaaaccgaatccgttcccgaaatccatttacaataacatcacacatgcgctgaagtatgcgggggaacgcaggaaagccgttttggatgatgcggtcgaggaaagcttaacgaaggcggcgctttgggatgaagttaaagaccggcttcattcatcggctctttcgttatcaggcggccagcagcagcgtctttgtatcgcccgtacgcttgcgatgaaacctgccgtacttcttttagatgaaccggcctcagctctggaccctatttcaaacgccagaatcgagacgcttttgacagaactgaaaaaagattattcgattattatcgttacgcataacatgcagcaggcgctgagggtgtctgaccgaacggctttctttttaaacggggaagtggtggaatacgggcagacagaacaaattttcacgagtcctaaagcgcaaaagacagatgactacattaacggaaagttcggatagggggaaggactgtgagccttgtgaaggaagcggtgcacacacagaatttatttgatattcacggcatgaacgtatggtacggagcccaccaggctttaaaagacattacgatcggttttgaggagcggaaggtaactgcgatcatcggtccgtccggctgcgggaaatccacttttattaaaacattaaacttaatgctgcaaatggccccgaatgtcaaagtgacaggcgacatgatctataacggacgcaatctgctgaaagaaaagacggatgcggcagaattaagaaaacagatcggtatggtgtttcaaaaaggcaatccgtttccgcagtcgatatttgagaatgtcgtgtacggtccgagaattcacggcgaaaaaaataaaaagaaactgcttgaaatcgccgaggaatctttaaaggccgccgcgctctgggatgaagtgaaagatcgccttcaccagcaggcgctttcactgtcaggcggtcagcagcagcggctgtgcatcgcaagggcgctcgccacaaaaccggacgtccttctgatggatgaaccgacgtccgctcttgatcccgtgtccacgcggaaaatagaagagctgattttgacattgaaagaaaagtatacaatcgtcattgtgacgcacaacatgcagcaggctgcgagggtctctgatcaaaccgcgtttttctatatgggcgaactggtagagtggggggatacgggcaaaatattttctcaaccggatcatcaaaaaacacatgattatatcaccggaaaattcggatgaaaaaaacgggcccggccattgaccgggtccgttttatactgcctattaaaaaagcctgccggccatatccatctgaatggacgatgcctgcaagcttttttagcgggttaatgttttgacgatttttttaaagctcatatctgagtcgactttgaaatggccggcgcggatttctttatggtagcctgcgtcaatgacgtaatcattaaagtctttcgctgaaggaataatcccttctttttcaagaatggatgacacatcagcagtgctcattccgtctttaatcgtcagtttgtatgttacttttttctttttggcgtctgtgttttggtcgttgtttaacgatttttctttagaatcaagcagtttttgatagtcatcccggttgacggagactttttgctgatcgtcgaggtagctgtttacttctttttctgtcaatgctgttttttcggttttaacggcggctgcctggtcatggtcagtcaaatagaagacagcggcgagaacggccgtcgctaaaatcatgcctgctgcaaaagcctgaatgccccgttttgtcatacgagcaccttctcattatctttaataatggtattgacgtcctcgacagacacgtgctccgcttttgcgatggcttccgcagacattccgttgttatattttgaaatgatttgtttggcgattttttggttaatgccgctgcttttggctttgcggatcacgaggttggtttccagcaattcttcttcaagcaccgtcattttctttttcagcttgtaaatttcctgcatggcggaaagctgaagcgtttcaagctcctgttccacgtctttcatcggatctctttgagaatatgagaatgcaataagcgctatactgacgataaacaacgcaataatagcaatttccacgtttcatcaccttctattattaatttgcccttcttttttataccataaaacgccgccattctaaaggaaatagagaaaaaaacggaattttgtcgggaaatcttttttattcggggagcaaacggttatttctctatagatttcgtatcagaaagtccttttttgtcctgtttcgtcatattttcccttcatttgacgcaagctcattcagaggatcagaagcataaactgatgttttctgcacttaaacaacatttcatgtaaatcactctagcattccgtccattatagtggtattatatataagtctgaataagtaaatgatatttagtttggagggaaaataatgcgcgttaatattactttggcttgcactgaatgtggtgagcgtaactatatttctaaaaagaacaaacgcaacaatccggaccgcgttgaatttaaaaaatattgcccacgtgataaaaaatctacgttacaccgtgaaacaaaataagctgtttaaaacagcggaaaaagctggagctttcaataaagttctggcttttttgtctttcagggaggtttgagaaacgtgaaagcacaaatcagaaccgctatcaaagcaaagctttctgacatgacagaaagtgaatgggagaaaaaatgccgaagcatgcgtgaaacgctgttttctttaaaagaatggaaacaggcccgcgtgattgccgttaccatctcgacacgcctggaaattccgacacggccgattattgaacaggcctggaaagagaaaaaacaagtctgtatcccaaaatgctttccgcagacgggagcgatggagttccgtacattttctgcgtatgatcagctggaaaccgtatatgagggcctcagtgaaccgatcgagagccagacggaaaaagccgccccaaatgacattgaccttgtgattgtgcccggcgtggcttttgaccgggaaggcttcagaatcggatacggcggaggatattatgatcggtacctctccggttataaaggccgtaccgtgtcgcttctctttgactgccagctgacagaccgcattccccgcatgccccacgatattccggtcgatatgatcgtgactgaatctgaaaccatcgcttaatcgcataaaaaacttcttgcaccggaataattctcgctgtttgacaaacgataggggcaggagggataagatgaaaaaattgttgatctactcattatgcgccgtatctgttttagccgtttaccaaaaccgctaccgtctgatgaacagcgtgctcagccagccggggatcagacggtcattcattcatttctttttaaaaataccgtttatcagaaacaaattcattcagcaggcattttaaacaaatcccgtttttcagcgggattttttgcataagaaaacctgccggtaaaaaacggcaggttttctcgtattgtcagctttttttcaggaaaccgagcagaattgagatcataggagaaatgtacaggaaaaaggtaaacggcaggtagtcgatgacggaaacccctaatgcgcttgccataaaagcgccgcttactccccagggaatcagcgggttgatcaatgttccgccgtcctcaagcgaccgcgcaaggtgaatccgcttaatgctgagcttgtcatataaaggtttataagattgacccggaattaagatcgacaaatactgctcacctgtcgcaaggtttacgcctatacttgagaagacggtcgccatgacaagacgtcctttcgtatgcacgccttttatcaatccttgaagcagcgccgcgatcaggcccgttttttccatcaggccgccgagcgcaaaggcgatcatgatcagagagactgatcccatcatcgattggagcccgcctctgttgataatgctggccacagcctggtcgccggttttaaacgccgtcccgctttgcagggcggatataaatccttgaatgctgctgtcaggaataaaaacagcagtcagaagccctgcggaaataataccggcggtaagcaccggaatcacggaaacccgtctcacagctaaaatgatcaccaacataggtgaaagaagcgaccaaggcgtaacgtgcacggcctcttttattccggaaatgaccgcctcaatattttgcgttgaagcggcatttattgaaaccgatgaaccgagaatataaaaaagaacaatcgtgatcagcagtgccggaacggtagtgcccatcatatggcgaatatgcttaaaaatcggaatttcgccgattccggcggcaaaattcgtcgtgtcggacatcggtgacattttatcaccgaaacaagccccgcaaatgactgctcccgccgtccattcgagcggaactcccgccgcgcttgctacccctaacagcgcgacgccgattgtactgacagttgtcagacttgagccgacaagcgtgctgataatcatgcaggaaaataatgcggtcaaaagcagcagactcggctgtataatcgacaaagcgtaaacggtgacggtgggaatggcgccgctgtacatccaggcgccgatcagcacaccgatcaaagccagcacgataatcggctgcacaccgtttttcaatccgctgacaattcctttctcaagactctcccacgagaaaccgagccacaaacctgccagagacagaataatgacgcaaaagaacagcggcatatgcggctctgtatgaaagaaaaacaggcaggaaataatgactgctaacatcaagacaaataaactgatggctgagatgaacgtcagccttttttcttgtttcaaaacaacaccccatcaaactttaatccttttgtgcttttgggcacgaaagtattgtaacagaaaaacgcataaatgagtgtttttttacaattgcgaatatacaatttatgaaaataatacaaggatattttctccaatcgttttttgcttgacgcccggatcagtgatgaaatacgcttatactaagaagaatagaaatggtgaagaagatgaattcattttatgacgtgcagcagctgtttaagtcattcggacatatcgtttatttcggtgacagacaagccgaaattgactttatgaaagatgaattaaaggaaatgtacttgtcaaacgtgattgaaagagaattatggcaaaaagccgccagagttcttcagagagaatcggagcggatcaaaggcagataacacagcaggattttaataagaaaaggagattattatggaagatacatggtttgcggggattgatcttggcggaacaaccatcaagctggcctttatcaacatgtacggtgaaattcagcataaatgggaagttccgaccgataaatcaggaaacacaattacggtcacgatcgccaaagcgcttgaccagaagctggaagaactgaacaagccgaaacggatcgtaaaatggatcggaatgggagcgcccggacccgtggaaatgacgacggggatggtctatgagacgacaaatatggggtggaaaaactatccgctgaaagaccatctcgaggcggaaacgggtattccggccgtcattgaaaacgatgccaatatcgcagcgctcggagaaatgtggaagggtgcaggtgacggggctaaagatgtcattttagtgacgctcggaaccggagtcggcggaggcatcatcgtcaacggagaaatcgttcacggcaaaaacggggccggcggagaaatcggtcatatttgcagtattccggaaggaggagctccgtgcaactgcggaaaatccggctgcatcgaaacgattgcgtccgcaaccggcatcgtccgcatcgcgaaagaaaagcttgcggcggtttccgactcttcgctcttacaagtgcgcgatctgacagcacgtgacgtgttcgaagcggctaaacagcaggataagacagcgcttgaagtcgtcgattatgtcgcaaaacatttaggcctcgtgctcggaaatctggcaagcgccatgaatccgacgaaaatcgtgctcggcggaggcgtctccaaagcgggtgaaatcctgcggtcaaaagtggaagagactttcaaaatcaccgcgttcccgcgttctgcggaagcggccgatatttcgattgcggcacttggaaatgacgccggagtcatcggcggggcgtggattgccaaaaatgaatggctcaaacatcaaaactgctgaagaaagtcagcctgcccatatcgcgggcggctttctttttttatctccccagtcatatagtttttaaaaaagggggatgaacatggcgggaattcgtgtcaaacctgaattgaaacagcatatgaaagatattgcaaaggtgctttcaattgatgaaaaactgttgaaagccgctgataaaacggcggaaaacgatgaattattttgtcccggctttgccgtgagcgggcagtcagagggtccgccgcttgagacgctgagcgggctttcgcgatacatccggcactgtgaaaggattctttccgctgatcaatgggtgaaggaagaaaaggtgtacggctccgaatcggtttatgaagaaattgagaaaataacggatgtctttccgtttgtcacgtgccgtaaaatcggcagttccgtattgggaaagccgctttatgagctgaaaataggtgcggatacggctgaaagaaaagtccatgtaaacgcctcatttcatgccaatgaatggatcaccacctcggtcgcgcttaaatggtgtaaagaatattgcgcggcattatgcgaaaataaaaccgttttcgggcactctgcgcttgatatattcagcctgacatcattgtcattcgttccgctcgtaaatcccgacggtgttgatctcgtactttacggatgtgaagatttatcagaaaaaaatgaatttcttaatcgattaaatgaacaccgcccggatttccgcgaatggaaggcgaatataaacggtgtggatttaaataaacatttcccatccaattgggatattgaacagaggcgcaaaccgaaagccccttcataccgtgattttccggggacggcgccgctcactgaaccggaggcgcaggcgatgcaccggctgataacggagcagccgcctgaccggctgatcgctcttcatacgcagggagaagagatttattggggatacgaagaatgtgaaccggagcaatcatcccggatgattcaggagtttgaagcgataagcggaaaccgctatcaaggcgttaaaaccattgacagccatgcgggttttagggattggtttatacagcagtatggaaaagagggctataccattgagctcgggaagggaaaaaaccctttgccttttcatcagtttgctgatatttatcaagcgacggaaggtattttgtggaggtcgcttgttttttgagacatctgtgaaatttctcatttgtttacataaacaaatatgggacaatagaatagaatggagggaaggctggtgagatacttggtttgtgttctgctgtccgcattcgttctgtgtttagcggcctgtgaaccatctcatcagcagcaagacacaggcgtttcggcaaaatcggcagaacagaaaatcgttccgctcagtaaaaaggaagcggagaaaacggaaggatggctggataacagaacgatcctgtatacagcacatcatcagctgatgaaatatgatcttttcagcggaaaatccgaacggctctatgaaacaaagggcaatattgtcaatgtaaagatcagccggaaaaaacagctgattctcgtacaggtgacaagcagcggtcagactgagcttgtgcttatgaacaagcaggggaaaagactttatcacaaagcctttaactcttatgaactggagacggcttggaatccgtatgacccgtatcaaatgatgattaccgtttttactgaaacatgggacttcacagcctatacggccgatatgaacaacggcattttaaaaaagagtcccgttcaggccccttttgtccattggacctccactgatggattccaatatatcaagcaaggaaaaacggaggaagagggtcctttatattcttatgacttgcagacaaaaaaagaaaaaagagtgcttcatcacgtcatctgggccgattcccgcccgggcatgacgattgccgtcagacaaacggatcaatcggacggagacggcgagttccttttccaaaagccggcatccgtgacgcaccgctttcctctccaagaaaagtatcagagctttgcgccgatggagtatgattacgatcagacacacaagcggttttacatattcaagcctgaaggccgctcttacaatctgatcagctttgacttaggagacgaacgggagcggacggtgctcaaaaacacggaaatggagccgattcagatctctccgaacggggaatacgctttatacggctttacgtatgaccgtctgatttcactgaaaacaggcatgacagaaccaatcataacaaatgaaaaaggagtttgaaccaaatggcaattgcagatgtgacaatcattccgatcggaacaaaaacaccgagcgtcagtgagtatgtagcggatgtgcaaaacattttggaggggtacaaagctgccggcaagatcaaatttcagctcacgccgatgaacactttgattgaaggtgagctgagcgacttattcgcagtcattcaggacattcacgaagccccgttccaaaaagggctgcacagagtggcgacaaatatccgcattgatgacagacgtgataaagaaacgacactggagagcaaaatcaaaagtgtcagcaaacatttgcagcaataaaaaataagcctgtatccattggatacaggcttttaatgtgcagtcggatagccgctggttacaacggtcattacggtaaaccagccaaacacgcccagcgtggcggcggctaacaaaaatcccaggatatttctctgtctgacagcccgcaggactcctaatacagctaataatgcgacaaggccgaagattacaacaagtaacatcatgctcctcctttgtcattgaaacctgaaaatctttccatttcattttaaccgttttcattttgtttgtcgatagcgttttcccggccgcattcattgaatcttccgcagaaaaccttcataataagggcatatacataaagaggtgatgaaagtgaaatggagacgaatgccggccggtccgattcaggcaaacgcgtattttcttgtcagtgaggatcagtcctgtcttatttttgatccgggcggggaagcggacaaaatcaacaattacataaaagaaaacaatctgaagccgctggccatcttactgacgcacgcccattttgaccatatcggcgcgcttgacgaagtaagagacagatgggatgttcccgtatatcttcacaaaaatgaagaaaagtggctggaggactcttccttaaacggatcaggcatattgcggggcatcgccgtaacggcacggcccgccgaacggctgattgaaggcgacggcatattggacatcgggcctttccatttggagacattgtttacgccgggacattcaccgggaagcgtttcttattatgtgaaggacgcggatctggtgatttcaggtgatgtgctctttcagggaggcatcggccgcactgatttacacggcggaagtcaggacgtattgcttgattccattcatcaaaaactgctcacgcttcccggatatacacttgtgttaagcgggcacgggccggaaacggatattcagacagagcaggagcgaaacccgtttatcaatggtttttcactgtaaatgaaaaaagacagaccataatcggtctgtctttttctgtcagtgggttccgccgcccggtgtcataataaaaatagagtaatatgtaaatccggcgaaaaatacggttaagtaagctccgaaaatataaatatacatccgctcagtcagattcaaataagaaagaaatacgaaaaagatcgtctgtccaaaaaacaaaagtgaagcgtctttcatgccccctaaaaaaaacatgactgcaaatatccccgtccaaaatcctaacacccggaacatgcgattcattccttatcccctcccgagagtctatctgaagtttattataatagatcggcactcgaaatgtaaacattttcatgattatatttattgtggaatttatgtctttccctgtgttttatatcttatgccgccctctgaaaaagatccgaaaaatctttttgaaatatgtttaatgaaaaaaagttcagggtacttatgttaacaaagagacggattatccgagggaggaatttttaaaaatgaaagaacttattttttattcatacccgagctgcacatcatgccgaaaaacgaaacattggttaaaagcccacaatgttgactttcaagagcgccatctattcagggagacaccgacaattgatgaattgaagcagatcttatcattaacgactgaaggaattgatgaaatattggcgacgagaagtcaaacatttaaaaatctcaacctgaacattgaagaaatgactgtaaatgaagtgctgaagcttttgactgagaagccgaaactgctgcggcgtccgattctgatcgatcgaaataagctcgttatcggatacaatccaggagaactgatgaagctgacgaagaaaaaaacggtacatcaatctgtatcataagagaaaaacgaagatccgctgatcaaaatttatcagctaatcttcgttttttgcggttgcgggactgggctagctggattcgaaccaacgatcacggagtcaaagtccattgccttaccgcttggctatagcccatcggatgtaattacagtatgtgcgtccggcgccgatttatacatacaaaggaatttgaatggaggagacccgtgaaacatttgagtgaaacattatctcgaaccttaattgaagaatcaggtgaaatcacacgccagtggctgctcataccaaaatcggggcggcctacagatgatcagaaagcggaaatgcagcaccgtctgttaattgaaatcgttgccggcattttatcggaaaaagacggcggggaagaggagctgacaaaatgggcgcttcagttcgcaagggaccgggccgtccatgaagtaccggtctatgaaagcgtcacgagctttaaagaattccggagattggtctggaaccgcatacagacgtgctgtgaaacaatgtctgagaagcctggggcgaatgcggtattccattggggagagaagctgaacaaagcaattgaccatatgattgaagtatttacagaggaatattataaagtgacggttacacaattaaacgcccaaaaagaaatgattaacgaactaagtgcgccgattatgccgattgccgacggtattggaattttgccgctcgtcggcgaaattgacacctaccgggcaaaaatgattttggaatcggtgcttgaccaatgttcttcactccgtctttcttatttatttttagatatatcaggtgtgccgattgtggatacgatggtcgcttatcagatttttaaagtgattgacagcacaaaacttcttggcatagaaacgacaatctcaggcatcaggccggaaatcgcgcagaccgtcgtgaagctcggcatcgatttttctcaggtgaaaacggagcagagtctggcgaaagcgctggcaaaaaacggatttatcgtaaaagaatcattaagatgataaaaagctgaatggccgggagggatttctccctcagctattcagctttgtcagcttcaatcgtaatgatatgatggctgtcgatttcttttaccgtaaatgtgtagccttcaaaatcaatggtgcttccgggcttcgcgtcaatatgctgagtaagaaaccagcctccgagtgtatcgacttgatcagccgtaatctctgttccgagtaaatcattgacgtcactgatcagcaatttggcgttcaggagatagcggttcttcccaagcttttgaacggaaggtgtttcgtccgtatcaaattcgtcgcggatttcgccgacgatctcttcaatgatatcttccgccgttactaatcccgcggttccgccgtactcatcaatgagaatggccatatgggcgtgttcccgctgcattttaacgaataattgataaatcggaatcgtctcaatcacatggatcgccggctggatgtaagggctgagttcgtgttttgtaaacgccgctccttctgacaggaatctgaataaaacttctttaatattgatgatgccgactacatgatctttatctccttttactacgggataccgggtatatttatttgttttgataatgtcccggagcatatgtcccgatccgctgtctaacggcaggctcaccatttcattccggggcaccataatttctttggcagtgcgcttatcaaatgtaaaaatgttatttacgtaatgcagctcgctttttttgatcatgccgcttcgatagctttcggcaaggagcacccgcaattcctcttccgtataagccatttcatgttcggaagcaggcttcaagccgaacatggctgtaatcaggcgtgcggaatgattgagcagccagatgaacggaaacattaacttataaaacaaaatcatcggtctggcagataaaagtgtaatccgctcggctttttggatagcaaaacttttcggggcgagttcgccgatgacgacattcacatatgtaaccagcagaaaggcgatgattaatgacaggacttgggcaaccgcttcgtgaactccggtttttaaaaataacggctgaagcattgctttgactgtcggttcacccagccagccgatccccaaagcggtgacggtgatgcccaattggcacgccgataaatattcatcgaggtgtgtaatgacatgcttggctgcttttgctccttttacattttcctcaatgagctgattaatgcgggagcgccttgctttaacgattgaaaactctatggcgacaaaacacgccgttaataaaataaatagtacgatggcagatagtttgatgatatacaatgtaacgccttccgcgaaggaaggcttgcacctcccttttttcggaataataccactgtagaaagctgctcaaacatcgagcctggtttagcccgcctcatttacggtaataaaacaagaaagcgatactggaggatgacaagagatgaaggtacattcgggagcggactggctgtggtaccagctcggtccgcatgaaaaaacggaagcgaaaaaaatgatccatcacaatcactggccgcaatgcgaaaagtggtttgaacatgaaaatcatataaactttctgcgctcagatacaaatgatcagaataatgaagcggttttcggttctttaatctatcatcaaggattagatgatgaaaaaaaccataccgtatttcacttttatattacgagagacttcttttttacgattaattttgatttttcgctgctgcgcggtgtaaaagaaaagcatgccacacagcagattcaaacctgtgaaaatccgattgaaggcttttttgttctgctgggagagctgatgaattcctatctgatcggactggatgaatttgaagtcaagcagcggacgctgaaatggcagattcatgatgacaacagcaaaggaatcttggaaaatgtgcataaattgcgccatgagctgttcatttggaaaggccttacactgggggctcaaaaagtggaaatggctttaaaagaagcttttctcccgaaaaatgacaggcagaaagattacctcagagctcatcaaaagatggaaagaggaattacatatatcaatgagtttgatcaggaactgagcaatctgctgcacgccgaggaagtcattacctcccaaagaggaaatgaaattgtgaaagccttgacgatctttacaactctctttacaccgatgacggcgcttggagctctctgggggatgaactttgataacatgccggagcttcattggaaatatgcgtatatttgttccatcgtgctcattattgtatcaaccctgctgatttatatttatctgcggcagaaaggctggacaggggacattttgagggagcatcaaaaaaaatatttgcggaaagaaaagaaacgctaagaagagcaggcatacgcctgctttttttgatggctgaaaatggccgaatggttccggatttcattcggtaaatcaatgtcagggggcttatttttatttttttacgttttacacactgtaaaacgcataatctctcctttgccggcttttgtgtatctgatttacaatacgtgcggaaggagggaagtcttgtgaaaaatatagaaacatacagcaggaacatcataaacgaggcctatacggcaagggcttcagatatacacattgtgccgagagaaagggatgctttcattcattttcgcatcggccatgctcttgtgaaaaaaagagtcttaaaaaaagaggaatgcgtaaggctaatttctcattttaagtttttatcggccatggatataggagaaagacgtaagccgcaaaacgggtcattgtctctgccgcttccgacggaaaccgttcatttgagaatgtcaaccctgccgacaatgaatgatgaaagtcttgtcatcaggcttttgcctaagcggcagattccccctctggataaactgtccttatttcggggggcgggcgccgcactattgtcctttctgaagcattcgcacggcctgcttctgtttaccggccccaccggatctggaaaaacgaccactctttactcgcttgtcaactatgcaaaaaggcatttcaaccggcgtattgtcacgcttgaagaccccgtagaaacaagagatgaggatgtgttgcaagttcaggtgaatgaaaaagccggagtcacatattccgccggtttaaaagcgattttaagacatgatcccgatatgatcatcttaggggaaatcagggatgccgagacggctgaaatcgcagtccgcgcggccatgacgggacacctcgttctttcaagcctgcatacaagagatgctaagggcgccatatacaggctgctggagttcggcgtgaacatgacagaaattgaacaaaccgtcattgccattgccgctcagcgtctggttgatttaacatgtccgttctgcaaagaggaaaactgttccgtgtactgccggatgtacaggcagacacgccgtgcgggcatttatgaactgctctacgggaaaaacctcacccaatgctttcaggaagcaaagggagagcacgccaattttcaatatcagacgctccgcaggctgatcagaaaaggaatcgcgctcggctatgtcacgaccgacaattacgatcggtgggtgtatcatgaagcggattaaacgaacctggccgttgaaggatcaagcggcttttttgaaaaggctcggtgaaatgacggaaaaaggatacagtctgattgaagggctcagactgctgcaactccagctgcataaacgtcagcttgcagagctgacggacggaatccgccggctgagggaaggtgatgcgttttaccaagtgcttgaggcactgtcttttcataaagaagccgtctctatctgctatttcgcggagaaacacggggaattgccgggggcgatgaaacaaagcggcgaattattacagagaaagctcatgcagacgaatcaaatcaaaaaaatgctccggtatccgatgtttttaatatcttccgtctgtgtcatgttttatattctgcaaagtttaattattccgcagtttgctgggatttatcaatcaatgaatatgaatacatccggtacgactgctttcatctttgcgttttttcggcattttcatgaagcctgcgcactggcgctgtccgccgctttctgcttgtttttgtacgtttggttcttatgtaaaaaaaaatccccgcaagataaaatgctgattgttgtgaaaatacccctcttaggaaaagcggccgttctttttaacagctactttttctctttacagctcagcagtcttctgaaatccggcctttctatctatgacagcttaacagcttttaaagaacaatcttttctgcctttttatcgtgaagaagcagagatgctcattacacgtctgaaagccggagaaaccatagaatcctctctttccgggcatccgtgttatgaaaaagaccttgcggctgcagtcagccacggacaggcaaacggcctgcttcaccgcgaactttatacgtacagccagtttatgatggagcgtcttgaacaaaacgcgacgaagtataccggcattctccagcctgtcatttacggtgttgtggccggtatgattttaattgtctacatgtcaatgctgatgccgatgtaccagatgatgaaccaaatgtaagggagtgcttcgtctgaaaaatcaagatggatttactttaattgaaatgctgatcgttttatttatcgtttccattctgcttttaatcaccattcctaacgttacaaaacataatcaaagcattcagcataaaggctgtgaaggactgcagaatatggtgaaagcccaagtgacggcgtacgaaatcgatcatgaaggtaaaatgccggatatgaacgatttacaatcagaggggtatatcaaaaagaatacagcctgcccgaatggtaaacagatcttaattagtggcggagaagttacagttgaacaataacaggcggacagaaaatgggtttacccttcttgaaagcctgattgtgttaagcctggcgtccgtcctgctgacggttttgttcacgacggttccgccggcctacacccaccttgccgtgcggcaaaaaacagaacagctccaaaaagatattcagcttgctcaggaaacggctatcgcagaacataaaagaacaaaaatcacttttcttccaaaagagcataaatacaaactgcagtcaggcggaaggattgtcgagcgttcctttgattcgcttcacattacacttgtgactttaccggagagccttgaatttaacgaaaaaggccatccgaattcgggaggaaagattcaattgaagagcgccgggttcacctatgagatcacagtttacttagggagcggaaatgtccatgctaaacggaaataaggggttctctactattgaaacactatcagcaatggccatttggctgttccttatgacgtctatcattccggtctggacgggcatgctgactgatggtctgaaaatagaagatcgccatgaagcgtaccagcttcttcagaaacatatcagcacttatatgatgaccggaaaaaagccgccgtctcccggtgtgaagtggaaggaggatggtgagtattacaaagtgtgtacggctgaccgcagcgaaaaagaaatgtgcctcagcattctcaaaacagactggctttacgcttcttaatgttttgttctccttggcagtctgtcttttcctatcaggcaccttgggcccgattttacatctgtttttatcaaaccggaccgataacggcggattagacagccgggagcatcaaattgccgttcagcagatcatgaacgaatgtaaacaggctgaggctgtgaagccggcagacggcggacgggcgttagcatgccggaaaaccggaggcgaagaagtgcgttttgaaatttatcataagatgataaggaaaagagtaaacggaaaaggccacgtgccgatcctgcaaaacgcggcatcattaacggctgatgtgaaaaacggcctgctcttattagagatttcaagcgttgtaggtcaaaagaatcaggcggtcattccggtttacagctcttttaaaggtgattaaatgtacaaatctgacggttttatatatcccgcggttctgtttgtttctgccgcagttttacttgtcatcagctatacttcatctgatttcatcacccgaaaaacatttgcaaaagaggccggggagtactggaccggagagaacctgctccaaaacggcgcgctgctgtcaagccgccatatgacacagggacaaagggtccaaactggtacacagcgttttccgtatggcaccgtttcttttcacatcacggggagtgatcggcgggaaacggttcaggttacaattcaggcggaaaccacgacaggaacgagacgggaggctcaccttttgttcgatcagaagaagaaacagctgattcaatggacggaagtataaaaaagaggcggcgggacaacacttcatagtaaagacagcactatgaggtgagagccgtgaaaacaaatgattatgtaaaatatatgactgagcaattcgttaaatatttcgatacgccgaaacaggaacggagagagcgaaaagaagtgcggaaagaaaagaaagtgccggcttctcagcactggttcggaatattgccgtatagttttaagctgtggatgcagcggaaaaaataaagtgaatcacacgaaaggtcctcctgatacaggagggccttattggtattcctcaatgacggcaattttatttaccttttggctgtagggattaaaagaaatcgtaacaaacacgccaaattctttttcgccatcccgcaatgtcaagtggtattgcttgactgcttcgtccgttcttttccgatcccacaccttttgaataaataacgtttgggcgagcggatatctttttttagcttccttttctgctaacttttcccattttgatttatggtgaacagcataataaggcaccgtttccgcctgagctgttcctgaaaccccgaaaacaagaagagaaaggcaaatcagactttgtttgatcatcattcttcgtcctttcgctgtatatactttccattttgttctaggcacctcgttattttctcacgttttattagaaaaaattccaaaaaggtgtgtaatttgaagcaaaacgctgtttttaaaagataccattctcaaaaacgaacaatttgaccgattttgacatttttcaagacgataatccttgattatactttgttcatacagttctttaaagagaacggttgtcatatttattaacagttttacagggggtaaggcatgttccgattgttgcgaatggaaaaaaagggcaaggtgagatggcggatgatgctattgttacggctttcgttcattttttgcctgtccgtgacgatatgtgctcagttcacaggtgatacaagttcctccttcaatgatgtgaaaagcttcagtctccaggttcaaacgtgcggagattttcaatatacggatgacgattgccgttatgacgaacgctgggatcaaagtgatttacatataacaaatcaaactgatacgtcaggcaccgtgtgtacgccgcttcagctctatgccgagctggagaataagggaaaagagcggactgtttctgactggaaatgggagctccataaaattgcttctcagcagcagcctttacgaaacggcaatgttgtggataaagggcttattactgataaaaaaagcaaaacgatttataaaattgagtcaaagcggtctttgcagccaggcatatacgcattcaaggtttacaagcctgaagggtatccggcggacgaagaaaaatttgagtggtcaaaaccgatgaaactcgtcaaatgccgggaacaggcgaccgtttccgatctaaagaaaacggagaaagagccggctgagccggtaaaagaaagcggggaagaacatgaaaaaaacgctgaaactgatcagtaatattttgtatgccgtcatcttcagcttgattattgtgctgacgttaacggtgatttcgacccgggcttccgggggtgagccggccatcttcggctatacgctgaaatccgtgctgtcgggttcaatggacccggaatttaagacgggttcgctcatagcggtaaagaaaatttctgacgtgaatgacttagaaaaaggggatgtgatcacctttacgcaagatgacggaacagccgtcacacacagaataatcggtatcacaaaaaaggacgggaacctgctgtttgagacaaaaggggaccataatgccgccccggatgccgcacccgttcaagctgaaaaagtggcggcccagtatacgggatatcagcttccgtatgccggatatgtcatccatttggccagccagccgatcggaacggcgattctgttaatcgttcccggcgtcatgcttttgatttactcaataacagtcattgtcagcgccctccgcgatattgagcggaaaacgaaagcgctagaagaacatgcgaaaaagggaaccatctccacatgaatacggttgcaacctggcgacaggatttgataacaaaaataaaaagtaaggggagagtacaaacatgggtatgaaaaagaaattaagcttgggcgttgcatcagccgcactcggtttagcattagtgggaggaggcacatgggccgcatttaatgatgtgaagtcgacagacgctacatttgcgtcaggaacacttgatttatcggctaaagaacaatcagccaatgtcaatttgtcaaacttaaaaccaggcgataaattgacgaaagattttgaattcagaaacaacggttcacttgccattaaagaagtgctgatggctttgaattttactgactttaaaggagcaaagaaaggaaatgaatctgcggaggatttcctcagccagtttgaaattacggttctgacagtcggtaaagaagggggcaacggctatcctaaaaatatcattttgaaggcggccagcctgaaagacttatacttaatgtcaacaaaacaggataaagcagctgccgaagcgatcagcaagcacattgatccgaaattcctgagtgagagcggaaaagtcaatgtagcaaccattaacggcaaaacagctcctgagtacgacggagttccgaaaacgcctgctgattatgaccaggtgagaatggaaatccaatttaaaaatgacaccgcaaaaactgcggacggattaagtgtgcaaaacaagttccaaggcaatgcaatttctcttcaattctcttttgaagcaacgcaatggaacggcttgaccattacgaaagatcatacggataaagacggttacgtcaaggaaaatgaaaaggctcacagtgaggataaaaactaatccgaaagtcggacagttaaaagaggagttgtgcacatatggcggcactactcctctttttgcgcttttctccatttttgataatctaaaaattcacgaaattgtttttttgataccccggatgtcatcgcatcgcgaactaatttctcccattcactatctaattgaccatcgtattcggtttcatgtttttcatcaagtaaagtatgaaccgagacgtccagaacagcggagactttttcgagaaattgaatggaggggttcgtctgtaaatttcgttctattgagcttaaataagacttcgctaccccagctttttcagctagttctgatagtgagtagcctttttcttttcggtattgtttaatacgctggccaatcaatgtcatcaccttccttgtgatattatagcacattcagaaaggatttacggtatgacttctggctgcctggatatgttgagaagactttttatgcgaaagcaggtatttgcgtatttcttctaggctgatatttgctttttgggcttctaatatcagctcaacccattccttatctaattgcgaaaattccatttttgcatttttcatgcattttctcctcctaaaatacttgtttatgtatttcagccaatccgcccatgaccttatctttacatgtctggaagtgattcatcgcatgcgaaacgccagaaattttttctatatacttttattataatatagaatttccagaaaaaacgggaaaggtgtcgaatggataacgcttatccagaaaaattactttgcaggaaaaataaaccgccgttttcaatctgaatgtgaatgttcggctgatataaggctttcagcgcttgtttttccaaatggtattcctcaggtttttcctctgtctgctcataaaactgatcgagcagcctgaggtcctttttccatctggcgatcgcgctgtcagcccagtctgacggctctttggcggcagcgtcttttaagtaatgctccattcttttaattccgctttccggcttaatcatcggcgatatggtaaagcaatagtctgatatttgcgaggtcagcggaagcggtgcaagcttctgctgaaacccttctataattgttccagatacaagatgcaggcctaaagacaaaagtctgtcttttttcatgtcggattggtatgaaatcactacatttaatccaagccagggctgaagcggcactctggctccggctgatacaattttctcatatattcttgtaaatctcccattttgtttaactgcttgaaagatttgaaagaggcgcggggctccaaagtaaataaattcgccgtccatatcctccggagccgtttctttatcagtgatgaacgtgatcttcatcgggttcggttcgccgcccgttttttcacgccaatgccaataaaacgggcggttcataatttgtttgtccatctcgaccgtcaactgaaccgtcataaaacccggcccgtgttctgtaatcggacagtggttcgcttcaaaaaagcgcagtaaaaattcgtgaacctcctgctgtctcatgtcgcgcttcctccttttagattaagatcctttttttctggcgggcttttccgtaccgtacgacagaaaagaggtgagattgtccattttgattctcatttcttcctctgtcagcgaatggcataaaatatcatgcaaatggtcttcaaaattgctcactttgatttttgttaagatgtcatctaattctccgacgacattttcaaataaatgaattttgtcatacagaagttttaagatatgctcttccaccgtatgttttgtcgccatattgtagatatgaacatctctttcctgaccgagtctgtgaatccttccgattctttgttcaagccgcatcgggttccacgggaggtcataattgataatatggttgcagaattgcaggttgatcccttcgcctccggcttctgtagcgatcagcacctgcactttgccgcggaagagatccttcatccagtctttttttccgcgtttaaatccgcctctgaacggaacggagcttatgccgttctgctgaaggaaccattgcaggtaaatctgtgtcgccctgtattcagtaaaaataatgactttatcattaatcttttggatcaagtcaacaacttgaatcgcttttgagttttgcgtgacttgattgatgcggtccattaaattagcgatcgtctgatcatcgaatgcgggcgcttgtttgtctttttggtcaagcatttttttgagcgtcatatacacggcttccctgcttgaacagcattctctttgcagcgtcataatggaaaatgagcttgcgggcttttccgtgccgtttttcagtgcgacgatgtcatcgtaaagcgcctgttccgtcggtgaaaaggtgatcggcactgtttccacgtggcgcttcgtccatgtaaggccggtgtcgctccgcgtgttgcggatcatcaccttattgacgagttctttcaaatgctcatgagcgtcaatcccgtccttctgattgaaggtttcttgaaatccgctttcgtttcctaaatggccgggctttaacagtgacactaaattgaagatttcttcgatccggttttgaatcggcgttgccgtcaaaagcaggcagtatttcttcacaagacttctcgcaaattcataatttttcgttttgctgtttttgagcttgtgcgcctcgtcaataatgacgagatcatacggaatagaaaggacaatgtctttgtgaggcgagcgtttggccgtatcaatagaagaaacgacgatatcgcactgttcccacacatagcttttcttctgttcaacagcgggtattaaaaacttctcctgaagctctttcacccactgggaaacgagtgatgccggcacaagaatcaggatttttttggccagcccgcgaatcatatattcttttaaaatcaggcccgcttccaccgtttttccgagccccacttcatcagccaaaatcgccttgccgttcattttttcaacgactttctgcgcgacctcaagctgatggggaagcggagtgaaatcgggcaggtataaaggagccctcaatccttcaaattcaggaatggcaagggtctgctggacttcagccgacagtttgtacatctcccaatttgaccagggaccgtccgttttcagccgctcagaaaactctcccggccagtttgcatcaaatatgatctctgctgtcatatgtaacaaaaccgcctttcttttaaaaaactgatttatcataatttttgttgccggacgtaaatgagggtggtaggatataagtaatgatttcactaaaagatattgctttagtatgtccataaaattggtaaatatgagcgaatgacagcaaggggagagactcggacgaaagatgggcgtccgggcgccgaaggagcaaactgcggagtgaatctctcaggcaaaagaactcttgctcgacgcaactctggagagtgtctgcacttagaagaagcaggccaccaaaggggacgtctttatgatatgttcataaagtaaactttcaggtgccgggacagagaaaccttcattttcatgaggtgtttctctgtccttttttatatgtttttacaatgcgccaatgactgaagggggaagatgatgctgaaacgaacaccgctttatgacgtgtataaagaatacggcggaaaaacgattgattttggaggatgggagctgccggttcaattttcttctattaaagaggagcatgaagccgtccgcacaaaagcgggcctgtttgatgtgtcccatatgggggaagttgaagtatccggtaaagacgccctgtcttttctccaaaaaatgatgacaaatgacgttgccgatttaaagccgggaaacgcgctttataccgccatgtgttatcctgacggcggtacggtggatgacttgctgatctatcagaaaagcgagagctgctatctgctcgtgattaacgcgtctaatattgaaaaggacatcgcttggctgacggaacatacggaaggcgatgtcacgctgacgaatcagtctgacgggatttcactgcttgctgttcaggggccgaatgctcagtcggttcttacgaagctgactgaatgtgctttgtcctccttaaagccgtttacatttattgacgaggcggacgttgccggacgacaagtcctgctttcaagaacaggctataccggtgaagacggatttgagttatattgccgcaatgaagatgcggttcatctatttaaggagatacttgcagcgggagagcatgaaggcctcgttccgtgcggcctcggcgcccgtgatacgctgagatttgaagcgaagcttgctttatacggtcaggaattgacgaaagatattacaccgattgaagccggaatcggatttgccgtgaaacacaagaaagattccgattttttcgggaagtctgtattgcgcgaacagaaagaaaaaggagccccgcgaaagctggtcggacttgagatgattgaaaaagggattccgagacacgggtacgccgtgaaaaaagacggtgttccgatcggtgaagtcacgacaggcacgcaatctccgactttaaagaaaaatatcggccttgccttaatcaaaacggaattcagtgaagtcggaacggaagtagaagtggaaatccgtaaaaaaacggtaaaagcgaagattgtccgaacaccgttttataaacgtccaaaacagagctgaaaaaggagagtcatatgaagcatcgatatttgcccgcgacagaacaggataaaaaagaaatgctgaaagccatcggcgcagaaacaattgatgaactgtttgccgatattccggaaaatgtacggtttcaaaaagactaccaaattaaaaaagcaaaatcagaaacagagctgacgagagagctgacaaagcttgcggcgaaaaataaagacgctgttacatatgcatcttttctaggcgcaggagtgtacgatcactaccagccggttatcgtcgatcatgtgatatcccgatcagagttttacacggcatatacgccttaccagcctgaaatctcacaaggagagctgcaggcgatttttgaatttcaaacgatgatctgtgaattaacgggaatggatatcgcaaactcctctatgtacgacgggggaacggcgctggcggaagcggcgatgcttgcgtcgggacatacgaaaaagaaaaaaatcgttatttccgcagccgttcatccggaatcgcgggatgttttgaaaacatacgcaaagggccaatatattgaggttgtagaggtgcctgcgaaaaacggtgtcacagatcttgaagcattggaacatgccgtttgtgatgaaacggccgccgtgatcgtccagtatccgaacttcttcggacaaatcgagccgttaaaggacattgagccgctcgcacataaaggaaacagccagctgattgtttcttcaaacccgctcgcgctcggtattttgagaccgcccggggcatacggagctgatatcgtcgtcggggacgcgcagcctttcggcatacctgcggcgttcggcggcccgcactgcggctattttgcagtaacgaaaaaactgatgagaaaggtgccgggccggcttgtcggccaaacggaggatgaaaacgggcgaagaggttttgttctcactcttcaggcgcgcgagcagcatatcagaagagacaaagccacgtctaacatttgttcaaatcaggcgctgaatgctttagcggcttcagtcgcgatgacggcgctcggaaaaaatggcgtcaaagacatggcccgccaaaatatattgaaagctgattacgcgagacgccaagcggaaaaagcaggcttgcacgtagcatttgacggcccgatatttaatgaatttgccgtcaggctgaatcttcccgtcaaggaagcaaaccggcggcttctgcaagacggcataatcggcggatatgacttaggccttgcgtatccggaactgaatcagcatatgctcattgccgtcacagagctgagaacaaaagaagagatcgattcgcttattgcgggattgggggatcaacatgaataatcaagatcaggcgcttatttttgaaatgtcccgcgaagggcgtatcggttatagccttccggagcttgatgtgccggaaacagagcttgaaagccttcttcccggtgactatatccgcgatgaagacgcaaagctgccggaagtatcagagctcgatattatgcggcattataccgctctttctaagaggaaccacggagttgattcaggcttttatccgctcggctcctgtacgatgaaatacaatccgaaattaaatgaaaaaattgcccggatcgcaggtttttccgctattcatccgcttcaggacgaggacacggttcagggggcgcttgagcttttatacgatttaagcggacacttggaggagattacgggcatggatgaggtgacgctgcagcctgcggcgggcgctcacggcgaatggaccggcctgatgatgatccgcgcctatcacgaagcgcggggagacttcggacggacgaaggtgattgtccctgattcagcccacggtacgaatccggcatccgccacggtcgccggttttgaaacgattaccgtcaagtcaaatgagcacggactggttgacattgaagatttgaaaagagcggtaaacgaagaaacagcggcgctgatgctgacgaatccgaacaccctcgggttatttgaggaaaacattacggaaatggctgaaatcgtccatcaggccggcggaaagctttattatgacggagcgaatttaaatgccgttttaagtaaagctagaccgggagatatgggatttgacgtcgttcaccttaatctgcataaaacatttaccgggccgcacggcgggggaggaccgggctcaggtccggtcggagtgaaaaaagaattcattccgtatctgccgaaacccgttctcacgaaaaaagagggccgtttgacttttgactatgaccggccgcagtcgatcgggcgtgtaaaaccttattacggcaacttcggcattaatgtcagagcctacacgtatatccgttccatggggcctgacggcttaaaagctgtgaccgaaaacgcggttttaaatgcaaattatatgatgagaagactcgcgccttattatgatcttccgtatgaccgtcattgcaagcatgaatttgtgttatcgggaagaaggcagaaaaagctcggcgtacgaacgcttgatattgccaaacggcttttggatttcggctatcatccgccgactgtgtattttcctctcaatgttgaagaaagcatcatgatcgaaccgacggaaacggaatcaaaggaaacgctagatgcgtttatagatgccatgattcaaattgcgcgggaagcggaggaatcgcctgaaatcgttcaggaagcgccgcatacaacagttgtcaaaagaatggatgaaaccaaggcggcaagaaagcccgttttaaaatacgaacgtacacttgacggcagccgctgacacggtgtaaaaaaaagagctgtccgttttatacggaagctctttttttatgattagttttttgctttaattttcccgccccattttttaaatccgcctttcaggttgtaaatatctttacagccgtgtttgcggagcgtctgtgccgcacgtccgctgcggacattgttttggcagtacagataaacgggtttatcaggacggatttcacttttgcgctgtttcagctgtgacagcggaatgttgcgcgcgccgagaatatggccgccttcaaattcattcggttcacggacgtcaatcagctgcgcttttctgtagcccgcgcggaattcctcttccgtaagtgttttcattaaacgctgctggtaaaaatacgacacgatcatataaacgataaacgcagcaacaataattaaagcaatcatattagacaatgcgattctactcctttaacttataaaatcaaaaccctgcttcctgaaaacaaggcttaccggacgttttgggacaaatactattatagtaaagcatgaagcgattgtcatccttaatgaaacgaaatatttttcattttcaaggcagtttgttaaactgattttattaaaacgataaagaagggttcagtgtatggaaaaagaaacatggcggtttattgactcagggaatgaaagcccggcatttaacatggcgctggatgaagcgcttttatattggcacagccaaaaaaaaattcctccggtgatccgtttttacggctggaatccggcaactttgtctgtcgggtattttcaaaatattaagaaggaaattaactttgacgcagtacataaacacggcctcgggtttgtcagaagaccgacaggcggacggggtgttctgcatgataaagaattgacatacagcgtaatcgtttcagaggatcacccggaaatgccggccacggtgacagaggcgtaccgggtgatttcagaaggtattttgcagggattcagaaaccttggacttgatgcctgctttgcgattccgcgaacggagaaagaaaaagaaagcttgaaaaatccgcgctcgtccgtctgctttgatgcgccttcgtggtatgaactggtcgtcgaaggacggaaagttgccggaagcgcacagacacgccaaaaaggcgtcattcttcagcacggttccatcctgcttgacattgatgaggataagctgtttgatctgtttttatatccgagcgacagagtccgtgagcgcatgcagcggaatttcaaaaacaaagcggtagccatcaacgccttagcgccgaaacgggtaacgatggatgaggccagaatcgcttttaaagccggttttgaggaagggctgaacattcatcttgagccttacacactcacgtctgaagagcttgcatttgtcaatgagctggctgagacgaaatacgcgtctgatgaatggaattataagcgctgataaggcttgacagaccggaagcatccttgttttttcatgaccgttagtgtaaacttgtaatggtttataaagttaaggtgctttttgggagggttacttatgacaacaccaagtatggaagattatattgaacagatttatatgctgatagaagaaaaaggatatgcacgggtttctgatatcgcggaagctttggcagtccacccctcctctgtaacgaaaatggttcaaaaactagataaagacgagtatttgatttatgaaaaatatcgcgggctcgtattgacgtcaaaaggcaaaaagatcggcaaacggcttgtatacagacacgaattgcttgagcagtttttaagaatcattggtgttgatgaagagaagatttacaatgatgttgaaggaatcgaacatcatctgagctggaacagcattgaccgcatcggcgacctcgttcagtattttgaagatgacgaaagccggaaaaaagaattgaaatccgtacagaaaaaaaccgaaaatcccggtgaataaagggcagcccgaaatggggcgccctttttttaatgtcttcattctttggtctatttcgcccagccgtttcttaaaataataatacaccttgagatggaagggagagggcgcgctatgcagattgacggcgtattttcgggcggggggataaaaggggtggcgcttgccggcgcttatgaagcgctggaagaaaagggctttcgctttgaaaggctcgccggaacaagcgccggcgcaattattgccgcatttatcgctgcgggctatacgagcagagaggttcattccatcatagatgaggtggacggaaggcaattgcttgatcagagatactcattcctcccgctgaaaatcctgcggtgggtgtcgatatattggcgcctcggactatacagaggcgatatgctggaaaaatggattgcggataaattaaaagcgaagggcatcatcgcgttcggcgatttgaaaaaaggctcgctccgtctcatcgcttcagatctgacgaacggaacgatgatcgtgcttcctgacgatcttccccgctacggattaaatccggagatgttcccggttgccagagccgtcagaatgagctgcagcattccttatttttttgaaccgataaaactgaagacagaaaaaggcacctcaacggtcgttgacggcggcgtgttaagcaatttcccgatttggctgtattcaaaagagcggaagcgaccggtcatcggaatttcgctttcgccaaacgaaaaagagcgcccgaaaaaatcaatccgcaacgcttttgagctgttcggggctttgtttgaaacgatgaaagacgctcatgatgccaggcatatcgcgacaaagtacgaacagaatattatttttattccggtggaacatgtgatggcgacggagtttcatctcacaccgcaaaaaaaactagctctcattgagctaggaaaaagcagaacagagcaatttttgaagcaatggagctattaaaaaagcgctctgtttttctttttattctttttgccttctatgacggtaagctgggtctggctttttttcttaagaatcatcggcttcggtctgctgctgctcggcacgctacgcaaatggctgacccggcctctgtgtccggcgcggtgcttcgctttttgctccttcattcggagccgcgattgtctggccgcttttctgaaagcggttccgtcacggccggtgcggcggttcaggaccgtcctcacgataaaataaataatgatgcctgcgataataacggtgatcgctcttgaaatcatctgcccggggttggttaccgccgcataaatgaaaccgaatgcgccaagcgctatcaatacagcaaaaaaaggttgtacacgatgattcataactgcccacctccaaaataataacggtaacggttcagattacgttgtgagacggtttttcgctctgttctgaaatgtcttccagtctgagaagctcgttaaagctttctatggcaacctcgacctggtcatccgccggttcctttgtcgttaaaagctgcagccacaggccgggataaccgagcactttcaaaacggggatattccgcactctgttcgtcagctggagcacttcaaaggagatgccgagaaccaccggtataagcgcaatcctgtctaaaatccgcacccaaagcggatctgtcggaacgagtaaatagatgaacatgccgacaatgatcgtaaataaaataaagcttgaaccgcaacggtaatgaagccgtgactgtttctgaacattttctattgtaattggcaaattctgttcataacagtttatgaccttatgttcggctccatgatattgaaacactcttttaattaacggcgtcattgataaaaaataaatgtagccgagaagcagaataagcttaaacagactttcgattccgatctgcgcggcgtctgaggaaaatacgggccttacaagctccgctaagaagaccgggacgagcgtaaaaacgaatttgctgaacaaaaacgacagaacgccgatcaccgccaggctgaaaaacatcgataagcccgaacctttcttatcttcctgctccagctttgcgtcatcttgaggatcaagcccgtaacgttcgctggaaaagtttaaatgctttgtgccgttggcgctcgcctcaatgatggcgacgattccccgcaaaaaaggaatcttttttaaagccgaaagcttggcgttcggcactctcggaagcttgaaaaaatcaatgcttccgtcattcctgcggatggcggtaacataattttttctgccgccgaacatgaccccttcaacgacagcctgcccgccgtaagcaggggacgttttttgtttggacattgtttatcaacctgcctgtttttttaggatttactaaccatttcctttcactctattgtacaggaaaccgcggtaaacctctagttagacagccggaaaatcaatgctttttctacatgcagtataccccgtttctttagattttactcattgaatgaaaatatggcgcagttttttatgacttttcaattttggggcagtctatgactggaggtgccatgatgacaagcgaaaaacattcagaacaggaagaaaaaaagaagcaggatgatgatcagcagcctgtttcatttaccggcagaatttgcggtatcggatttgccggcggtgtattttggagtttgatcggctatctcgggtatgtctttcatttttcagagatcagccccaacatgattcttcagccgtttatgatcggagaatggaaaaaacaatggctcggcacgatggtcagcatcgttgtcatcggattcatttcaattgccggggcgtttatttatttcgtctgcctgaagcgttttaaaaccatgtggccggggatggtgtacggcgtcattttatggtgtgcggtttttttcttattcaatccgattttcgaagatgtgaaatcagtcactgaattgaaatcagatacaatcgtgacgacgctttgcctttacattctgtacggtttgtttgtcggctactcaatttccttcaactacaatgaacttacgtcagacaagcttgcaagggcgcttggcaacaagtgaataagtgtataatccctgtccggtatggtaaaatgttcacgagaagtgaacattttttatgctgaaaaccgggcggggatgctcccgcgttgtcaggcggcagtcaagaatcggcgaggaggagaaagggaatgaaacttgagaaattgcgaaatcttttcggtcagctggatatagacggaatgttggtgacaagctccgccaatctgcagtatatgacgggatttacgggttcgtcaggccttgcggtcatatcgaaagaacgtgcggcatttatcacggatttccgttacaccgagcaggcgaagacgcaagtgaagggttttgacattatcgagcacggcggaagcttaatccaaacggctgcggatacgattcttgagtacggcattaaaaaactcggcttcgagcaaaacagcatgacgtacggaacatatgcatcctaccaagcggtgctgcaggaagcggagatggttcccgtcgcggattccgttgaaaagttgcgcttgattaagtcaagtgaagagattaagatattagaggaagctgcgaagattgcggatgatgcgtttgaacatattctgacgtttatcaaaccgggcatctcagagatttcagttgcaaacgagcttgaattttatatgagacgtcaaggagcagacggctcttcctttgatatgatcgtcgcctcgggagtcagatccagccttccccacggagtggcaagcggcaaattgattgaaaagggagacttggtcacgctcgatttcggcgcttattataaaggctattgttctgatatcacacgcaccgtcgcggtcggagagccaagtgataaactgaaagagatttatcaggtcgtatacgatgcccaagcgcttggtgtcctgcatattaaacccggcatgacgggaaaagaagcggacgccctgacgagggatcacatcaccgcaaaaggctacggacagtatttcggccattcgacaggacacgggtttggaatggaagtccatgaatcaccggggctgtctttcaggtcatcggccgttcttgagccgggcatggcggtaacggttgagccgggcatatacataccggaagttgggggcgcaagaatcgaagatgatatcatcatcactgacgacggcaaccggacaattacgcattcccctaaagaattaattattttgtgatcggaatataggaggacatcaaacatgatttcagttaacgattttcgtacaggactaacgattgaagtagacggcggcatttggcgcgtcgttgacttccagcacgtaaagccgggaaaaggagcggcatttgtccgttctaaattgcgtaacctccgcacgggcgctattcaggagaaaacattccgtgcaggtgaaaaagtcgcgaaagctcaaatcgaaacaaaaacgatgcagtatctttatgccaacggcgatcagcacgtgttcatggatacaagctcatatgaacagcttgaattgaacgaaaaccaaatcgaagaagaattgaaatatcttctggaaaatatgtctgtgcacatcatgatgtatcagtctgaaacgctcggtattgaactgccgaacacagttgaactgaaagttgttgaaacagagccgggaattaaaggcgacacggcgtcaggcggcacaaaacctgccaaaacggaaacaggtcttgtcgtaaacgtaccgtttttcgtgaacgaaggcgatacgctggttgtaaatacatcagacggctcttacgtgtcaagagcgtagtcaaagaaattcggagtctgctccttttacggggcaggctttttttgcgttctgcctgaatctttcttctatatgaaaatagtgagactacttccgtcagctagagcatatagtgtaacaaaatgcttgaagttgggggattgcaatgaaatttttgtttggttcaatcaattctactgttttaacgatggccggtttacgagttttgtcctcgctcattgaattatcggccgctattatcatgcttttgacaaacgacatcagaaaggcggttgtggtgaatagtattttggcaatcgtcggcccgctgatctttatcatcacaatgacgatcggcatttatcagattgccggacagctctcatatgcaaaattaatattgatttttgcgggagtggtgctgattttggccggtgtgcataaatagagggccggggtgtcataaagtctgtcccggatcatacattttaaagaagccaatcggtaaaaaaggaggagactctattgaatgagattacagaggttctccctgaattattgagagatgccatctccgctgtgcccgaagaagcgagacgggatacagaagaaatcagaatccgcgtcgacaggccggttgaactgatccaaaaaggacaacctttgtatttgtcatatgtctgtacggccggcgacgcacagctgatcctcagccggctcagcaattacagtatgtacacgctggaagaagagctgaaaaaaggatatatcacaatcagaggaggccaccgtgtggggctggccggaagagtcatcgtcgaaaacggagccgtcaaaggactccgggatattacttcttttaatatccgaatcgcccgggagaagctgggaatcgcagaaccgctcattcctttcttatggaaagaaaactggctgaatacgctgatcatcggtcctccgcaaacggggaaaacgaccttgcttcgtgatttggcccggctttccagcaccggatcaaaacgcattcccgcaaaaaagacaggtatcgtagatgaacgttcggaaattgccggctgcctgcggggcattccccagcacagtttcggccgcagaatcgatgtccttgatgcctgtccgaaggcggaagggctgatgatgatgattcgctctatgagtcctgatgtcataattgtggatgaaatcgggagaatggaagactcacaagcgctgctggaggcgctccatgcgggcgtatccgttatcgtatctgcgcacgggtggaatatgaaagacttggtaaagaggccgtcgctgaaaatgctttgggaggaaaacgtgtttgaccggtatgttgaactgtcaaggcgccgcggtccgggaacgatcagcaggatgtacggaaaggacggggaacctgttccgcatgctgaaagcgtgatgacatgctgaagcttttgggtgccgtgtttattctgacagcgacgacttggaccggatttgagatcgccaaaatgtatatagaaaggccgaggcagatccgtcagctgcgcgcggcgctccaatcgcttgaagcggaaatcatgttcgggcatacaccgctgcataccgcctcgggacaaattgccgcacagctttccaaacctgtatcgttattgtttcaagctttcagcagaaggcttgagcagggaagcgattccgccaaaacggcttgggaacagagcttgaaacataattggtcttccatggcgatgaaaaaaagcgaatatgatgtactgaagcaattcggagagacgctcgggctccatgaccgtgtttctcagcagaaacatatcaagcttgcgcttacacatttggaagcggcggaagcggatgccggacgggcgcaggcgaaaaatgaaaaaatggtgaaaagcttaggatttttagccggactgttactcattcttctattgatgtaaacatgaggggagcaaacataaaatgggagtcgacgtaaatgtcatttttcaaatcgccggagtcggtatcgtggttgcgtttctgcacaccatacttgaccaaatgggaaaaaaagaatacgcccagtgggtgacgctgcttggctttatctatattttatttatggtggcgacgattgtcgatgacctgttcaaaaagatcaaagctgtgtttctattccaaggataggggggcttacagattgagattgttcaaattgtaggtttaggcctgatcgccacatttctctccctgatcgtaaaagaacagaaaccgactttcgcgtttatgattgtcgtcttcagcggctgcgtgatctttctttatctcatcgaccagatttacgacattatcagaatgatagaaaaaatagccgtcaatgcaaatgtcaatatggtctatgtggaaaccattttaaaaattatcggcatcgcctacattgctgaattcggagcgcagcttacaaaggatgcgggccagggagcgattgcttcgaaaatagagctggccggaaaaattttgatactggtaatggccgtgccgatactcaccgtcattattgaaacgattctcggacttattccttcttgatcataaataaaatggaaaggggggcacaaaaaatgaagcgctttcggtgggcgggagcttttttgttcatcctcttattttttcagactgaatgtgtacaagctgccggaacagacggtgcgtcgcaggaaaccgcagttcaccaagagtccgctgatgaagtggcgaaaaagcaggccgaagcgctgaaaacagaaggcatcggaaagttttgggacgacatcatgacagaatacggcggtcttctgcctgaaagccaaaagggaagcatcatcgactttattaacggagaaaaaacgttctcaccggaggcatggctgaaggctttattttcatacttgtttcatgaagtgctcgcaaacggaaagctcctgggaactttgattcttctcaccattttttgtgtcattctgcagctcctgcaaaatgcgttccagcagagcaccgtcagcaaagtggcttatgcaatcgtctacatggtgctgattattctcgctttaaacagctttcatgttgccgtcaattatgccagtgaagcgatccagacgatgacaagcttcattctcgcgctcatcccgcttttactcgcgcttttggcgtcttccgggggagccgtctccgcagctttttttcaccccgttattttatttctgatgaatacgagcggccttctcattcaaaacatcgtcatgccgcttatcttcctgtcagcgattttaagcatcgtcagcacgatgacggatcaatataaagtcacgcagcttgccaatctgctcagaaatatcgcgatcggcgcgcttgccgtatttctcaccgtgtttctcggcgtcatttccgtacagggggcttcggctgccgtgacggacgggattacgctcaggactgcaaaatttataacaggcaattttattcccgtgctcggccggatgtttacggatgcgacggatacggtcatcagcgcctcgctcctattaaaaaacaccgtgggaatcctcggagtcggaattttgatctgcatctccgcgtttccggcgatcaaagtgctctcgctcgcttttatttataagctcgcggccgctattctgcagccgctcggaggcgggcccgtcattacgtgcctcggcgtcatcagcagaagcgtactgtatattttcgcggcgctcgccatcgtctctctcatgtttttcctcagcatcacagtcattattacagcaggcaacctcaccatgatgatgaaataaaggaggcccattggatatgagctttttaacagaatggctgacaagcattattttatttatcttattcgccatcgtcatcgacatgctgctgcccagctccagtatgcaaaaatacgcaaagatggttgtcagtctgctgttaatcattgtcatgctcaacccgatattcaaacttttcaaaacagacccggaaatcatcttcgattatttgacaaaacaagagcaatctcaatccgctgatataaaaaatcaaattaaatcagaaaaaaaagaaatacaagcatcaaaccgcgcatatgttttagaagaaatggctgtccaactaaaaaagaaagcggaggagatgttcagtcatgacgaatacaaaatagacgacatccgccttacagcggaagaacaggttcgttcagaagaagatgtaaaaacgatcagcgtgtatatggccccatcttctgaaaaaaccgtgcaaaccgtcgcaccgatcgacatccgcacagaccgcaaatacgaaccggaaggcgcagccgacaaaaaagaggccgcagacatcaaagaaaaacttgcggatatatgggaaatcggcagtgagaaaattacggtttatatggaaggcggggagaaaaacggccatgaataaaaacggactatggaccatactcaaaaaacagctgatgatcggacaggcgaaagacggagaaaaaccaaaactgacaaaatatcattactttctgttcgtgtttgtgctcggggtatcttttatgctggtcagccagctgttctcttcaccggagaaaaccgggaaggaccaagcggcgcagaccgtcatgtccggccgaacggaagacaaaagcgggcaaaaaagcgcacccgtttttaaggcatcgaaagacggcagcgcaaaaaccacgatcgatgattacgaaagagactatgaaaaccagctgaaagaaatccttgaaacgattatcggcgtggaggatgtctcaattgtcgtaaacgtagacgcaacatctttgaaagtgtttgagaaaaataaaacgaaaaaagacaccaccactgaagaaaccgataaagaaggcggcaaaagaagcgtaaccgatcaaacctctgaagaacaaattgtcatgattcgaaacggggaccaggaaaccccggtcgtcgtccagacgaaaaagcccgatatccgcggtgtactcgttgtcgctcagggagtggacaacgttcaaataaaaaaaaccatcattgatgccgtcacaagggtgctcgatgttccgagctatcgtgtagcggttgcccctaaaaaaatcaaggaggattcataaatcatgctgaaaaaacaaacggtttggcttttaacaatgctcagtctcgtcgtggtattaagtgtttattatattatgtcgccggaaagcaaaaatgccgtgcagatgaaaagcgaaaaaagcagcggagaagtcgccactgaaaaaacgccggctcctgaaacgaaagataagagcggaagcggcacggaaaaagaagacggcacaaaaggaacgaaagattctaaaggcacaaaagaggataaagaaacatcagccgaagcttcggacaaagacggatcggtcgccacagaaacagctgatgaaaacttatttaccgcataccgcatggagcttgaagacgcgagaagcaaagaaagggaacagttaaacagcattgtttcaagcgatgatgcgaccgcaaaggaaaaaagcgaagcctacgataaaatgacggcgctgagcaatgctgaagggacggaaaaacagctggaaacgctgattaaaacacaaggctacaaagatgcgctcgtggatgctgaaggagacaaaatcaacattaccgtcatgtctgacaaacattcaaacgcaaaagcttccgctatcattgacctggtggaaaaagaaatcaagacgatgaaagacgtcgccgtcacgtttgaaccgacaaaataagagacctgaaccgcccgcacccgctgcgggcttttctgatgtcattttagatcagtgttgaatttacacaagcgctcctgtaagataaacatagtatgtacttttagtagcaacccataaatttctattttttatacataggagtggaaactgatgttaaaaatcaacgaaattcatgaactgataaaaagaatcgatgaatcttccatcgacgaatttgtttacgaaattgaaggcgtaagcctcaaactgaaaaaaaatgaagcgccggcagtgaatgtaacgggacaagcccaagccgttcccgccgcttacgcacctgctccgcaggctgcaaaaccggaagcgagtgaagccgctcctgctcaggaagcgccgaaacaagacgaaaacctgcacaaaattacgtctccgatggtcggaacgttttatgcttcttcatcgccggaagccggcccttacgtaaaccaaggttcaaaagtgagcgaaaatacagttgtttgtatcgtagaagcaatgaaactctttaacgagattgaagccgaagtaaaaggagaaatcgttgaagtgttagttgaaaacggccagctggtcgaatacggacaacctctatttcttgtaaaagctgagtaaggagacctgctattatgattaaaaagctattgatcgccaaccgaggagaaatcgccgtcagaatcatccgggcctgcaaagagctgggcattgaaactgtagccgtttattctgaggcagataaagacgccctgcatgtccaaatggccgatgaggctttttgtatcgggccgaaaacatcaaaagaaagctatttaaatgtaacgaacatcgtcagcgtcgcaaagctgaccggcacggatgcgattcatccgggatacgggtttttagctgaaaacgccgactttgccgagctgtgcgaagaattaaacgtaacgtttgtcggccctacggctgacgccatttcaaaaatgggaacaaaagatatcgcccgcgacacgatgcagctggcgggcgtgccgattgtgcccggttcaaaaggaatcataaaaaatacggaagaagcggtttcgcttgcaggtgaaattgggtatcctgtcattataaaagccactgcgggcggaggcggaaaaggcatccgggtcgcacgcacagaagaagaattgatcaaaggcattgagattacccagcaggaagccgctacggcattcggaaatccgggtgtgtacatcgagaagtacatagaagatttccgccatgttgaaattcaggtgcttgcggataattacggaaacacgatccatctcggagagcgtgactgttctatccaaagacgtctgcaaaaacttcttgaagagtcaccgtcacctgcgcttgattctgaaatcagggagcagatgggtgaagcagcggtaaaagcagcgaaggccgtcggttacacgggagccggcacagtagaattcatctatgactacagagaacagcgctactacttcatggagatgaacacgcgtattcaagtagagcaccctgtcacagaaatggtgacgggaacggatctgatcaaagaacagatcaaagtggcatccggacaggagctttcgctcagacaggaagatgttgaatttaacggctgggcgattgaatgccgcatcaacgctgaaaaccctgcgaaaaacttcatgccttcacccggtaaaattaacatgtacctgccgccgggcggactcggtgtacgcgtggattcagccgcatatcccggctactcgatcccgccgtactatgacagtatgattgctaaagtcatcacatacggaacaacgcgtgatgaggcagtcgcacggatgaaacgcgcgctgagcgaattcgtgattgaaggtattgaaacgacgattccgttccatttgaaactgcttgaacacgaaacatttgtcagcggagagtttaatacaaagtttttagaaacatatgatgtaatgggctcataatttttgcgggaggtgaattgaatggaagacaacagtgtgcttaaaatggatcatgatgaggctcatttaggcaaggttgaaattgctcctgaggtcattgaagtcattgccggcatcgccgcttccgaagttgaaggagttgctgaaatgcgcggcaatttcgccacgggcgtcgtagaacgcttcggcaaaatcaatcacggcaaaggcgtaaaggtcgatttagccgatgacgggattaccatcgacgtctattgcgtcgttcaattcgggatctcgatcccgaaagtggcggcaagcgttcaggagaatatccgccaaaccttattaaacatgacgtctctgaccattaatgaaatcaatattcatatcgtcggcattcaatttgacacgaaagcccaagaagtcgaaatcgacgaagaaatgtaatgagcgtataaaaaccaaggggatgggcagccctttggttttttatacgtttcccgtcatttcaggcatgaagaaagccggcttacaaacggcagccgagtttcttcatgctgtgaaatccgaatgaaattaatgcgttttgtgaaaatattcggcattagggtaaaaaacctaaatttcgacatgcgattgagaaaaaaatatgttatgatctctttaagcttaacgacaagcggataaagcggatctgaaggagaaagaaaatgaaaagaagaacagctagagaaaaagctttgcaggcactttttcagattgatgtcagcgatattgcaccgaacgatgccattgagcacgcgcttgatggtgaaaaaacagatgccttctttgaacagctggtgtacggagtgatcgaacatcaggttcagcttgatgaaatgatttccggccatctcgtcaattggaagcttgaccggattgcaaacgtagaccgcgcgatcctgcgtctggcggtgtatgaaatggtttattctgacgacattcctgctaacgtgtcattaaacgaagcaatcgagctggcaaaacggttcggcgacgataaagctgcaaaattcgtaaacggggttctttctaacattaaaactgatatcgaatcataggaggaaagaaaatgactgcaacaatcatcgacggaaaagaaacggctaaagaaaaacgcgaacaattggcaaaagaagtagaagagctgaaagcacaaggcgtagtgcctggattggcggtcattttaatcggagacgatcccgcttctgtttcatatgtgacaggcaagaaaaaagccgctgaaacaatgggaatgaaatttaagcttgaccgctttgactcaagcttaaccgaggcggagcttttaacagtgattgatcagtataatcaaaatccggaattccacggcattctcgtccagctgccgctcccggatcatatttctgaaaaagccgtaatcgagcggatctcccctgataaggatgttgacggtttccaccctctcaacgtcgggaaaatgctgcttggagaagatacatttcttccatgcacgccgcacggaattgtcgagttattgaaaaagacgaacgtagatctttccggcaaagaagttgttgtagtcggacgaagcaatattgtcggtaaaccggtcggccagctgctgctgaacgaaaacgcgaccgtcacatattgccattcccggacgaaaaatatgtctgagcatacgaaaaaagcagatattcttgtggtagcggtcggtaaagcgaacttcatcaaagctgatcaaatcaaagagggcgccattgtcattgatgtcggcgtcaaccgtctcgagagcggaaaactctgcggagacgttcagtttgatgaagcgaaagaaaaagcatctttcattacgccggtgccgggcggagtaggtccgatgaccatcacaatgcttgcgcataatactgttaaatctgccagacgtacgttatcatagataaccggagacagtcacaaaaagtgtgacaatgagcacgatacccgcttcttaaggctcctttcagccagagcgggttttcttagtttagggcaaaaagcctttatgaaaggagtgcaggatgtgagtgaagcggcatatgtcacggtttccgcgctgaccaaatacattaaacgaaaattcgatgtggaccctcatcttgaagacatttggattaagggtgagctctccaatgttaaaattcatacgagaggccacatctattttacattaaaagatgagcatgcccgcatgcaggccgtcatgtttcagaggcaaagttcgaggcttgcgtttaagccagaagacggaatgaaggtcatcgtaagaggcggcatctccgtctatgaaccgagcggaagctatcagctgtacgcgaaagaaatgcagccggacggtgtgggggcgctctacttagcatatgaagaattaaagaaaaaacttgccggcgaagggttgtttgatgaccggcataagcaggccatccccgcttttccggccacgatcggggtcgtcacgtcaccgacgggagcagccgtcagagacgtcattaccacactcaaaagaagatacccccttgtgaaagtcattgtgcttcccgcgctcgttcaaggtgaaaatgccagcagatcgattgtgaagcgcattgaagaagccaatgcacaaaaaatgtgtgacgtcctgatcgtcggaaggggagggggctcgatcgaagaattgtgggcatttaacgaagaaatcgtggcccgggcgatttttgcttccgccattccgattatatcagccgtcggacatgaaacagattttacaatcagtgatttcgtcgcggatatccgggcggcaaccccgacaggagcggcagaaattgccgttccccacacgacggacttaatggaacggacaaaaacggcggaagtccgcctgacaagagcgatgcagcagcatatcagcaagaaaaaagaacgggttcaatcgctccagtcatcctacgcgttccgttttccgaaacgattgtatacccaaaaagaacagcagtttgaccttttgtatcagcagttccaatcacagctcacagggcttacggacaggaaacaaaggcagctggagcggaatacgtacagattaacggcgctccaccctgaaacccagctgaaacaggcgaaaaaacggtacgaggagcgctcaaatcagctcgcccgaagcatgaatgtccagctgaagcagcttcattcgcagttccagacggttcttggtaaactgaatgcattaagtccccttcaggtgatggagagaggatacagcctggcctataaagacaaagagctgatcaaaagcgttgatcaagtggaacaaaatgatacggtagaagtaaagatgacagacggcgttctgacgtgtgaagtattgcaaaagagaggcgaacgataatgacagaaaccaaaaaaagtgaagagctgacatttgaagaggcgatgaaaggccttgaaagcattgtggcaaagcttgaagaaggagacgtgccgctggagcaggcgattaattattttcaggaagggatggccctttcaaaaatgtgccatgaaaagcttcagcatgtcgaaaagcaaatggactttattttaaaagataacggcgaacttgcacctttcagcgttcaggaggaagacgaaggtgacaaataaactggacgcatttttagcatcgcgcaaacaactgattgaacagcagctttctttgtatacagaacggcttgcaatgccggaaaccctcaaaaaatctatgctgtattctttggaagcgggcggaaagaggctgcgccccctcgtcgtcttagccgttctgaatgcttacggaaaagatgaaaaagacgggattccggtcggatgcgctgtcgaaatgattcatacgtattctttgatccatgatgatctgccttgcatggacgatgatgatctgcgccggggaaagcccacaaaccataaagtcttcggagaagcggcagccgtattggccggagacgggcttctgacagaaagctttaaattgatcacatctcatgtgtctgaggcggtttcagcagaaaaacggctccgtctcgtcgatgagctgatcagcgcggcgggaacggaaggaatggtcggcggacaggctgccgacatggaagcggaacaaaagcggataacgcttgaggagctggaatccatccacgagcggaaaacggccaagctcctcggtttttccgtgacggcgggcgccattttggcagatgcgccggaggatgaagtcgaaaagctccgtttgttcagcagccatatcggcatcggatttcaaatcagagacgacatccttgatattgaagggcatgaggagaggatcggcaaaccggtcggctcagacacgtcgaacgaaaaatcaacgtatccgtcgcttttaacgcttgaaggcgcgaaagaaaagcttgcgtatcatatcagcgaggcgaaacagatcatcagcggcctttctcttcagaaagaactgctgcatgacctctgtgatttaatcgcggcgagagatcattaaaaacggtcctgatttgaaggggctgccgctcctatggtaaaatgtaagcagtttcgatgaaaatacaaagggagtctttttctcttttcaaaaagacactgtttaatttgcagaaattcatgctgaaagtgagttgatccgctttggatcttttatcaatacaggacccgtcatttcttaaaaagatgtcaattgaacagctggaagagctgagtgaggagatccgcaatttcctcatcacatcgctgtctgcctctggcggccatatcgggccgaaccttggggttgtcgagctgacaattgcgcttcacaaagaatttgacagtccgaaagataaatttttatgggatgtcggacatcagtcctatgttcataaactgttaaccggacgcggcaaggagtttgaaaccttgcgccaatataaagggctttgcggtttcccgaaacgcagcgaaagcgaacatgacgtatgggaaacagggcacagctcaacctcgctctcaggcgcgatgggaatggctgccgcccgtgatattaaaggatcgaaagaatatatcatcccgattatcggagacggcgctttaaccggaggaatggcgcttgaagcgctgaaccatatcggtgatgagaagaaagacatgatcgtcatcctgaatgataatgagatgagcattgcgccgaatgtcggggcgattcattctatgctgggacggcttcgcacggccggcaaatatcaatgggtaaaagacgagcttgaatatttatttaagcgcatcccggccgtcggcggaaaattggccgccacagctgaacggataaaagacagtttgaaatatatgcttgtgtcaggcatgttttttgaagagctgggctttacgtatttaggcccggttgacggtcattcctaccacgaactgtttgaaaacctgcaatacgccaaaaaaacgaaaggccctgtcctgttacatgtcattacgaaaaagggcaaaggctataaaccggctgagaccgacacaatcggcacatggcacggaacgggtccttataaaatcaatacgggtgatttcgtcaagccgaaagccgcggcgccttcatggagcggacttgtcagcggcaccgtgcaggagctggcgcgcgaggatgacagaattgtcgcgattacaccggccatgccggtcggctccaaactggaagggtttgcgaaagaattccctgaacgcatgtttgatgtcggaatcgcagaacagcatgcggcgacgatggcggctggaatggcgcttcagggtatgaagccgtttcttgcgatctattcgacctttttgcagcgggcgtacgatcaggtcgtccatgacatctgccgtcaaaacgcgaatgtgtttatcggcattgaccgcgccggtttggtcggcgctgacggggagacgcatcaaggcgtctttgacatcgcctttttgcggcatataccaaacctcgttttaatgatgccgaaggatgaaaatgaaggccgccatatggtcaatacagcccttaattatgaggagggtccgatcgcgatgcgcttcccgcgcgggaacgggctcggcgtaaagatggataaagagctgaaaaccattccgatcggaacatgggaagtgctccgtcccggaaaagacgcggtcattttaacattcggtacgaccattgaaatggcgctggaagcggctgaagaactgcaaaaagaaggcctgtccgtgcgtgtcgtgaatgcgcggtttataaaaccgattgataaacaaatgatgaaggccattcttaatgaaggtctgccgattttaacgatagaagaagccgtgcttgaaggcggattcggcagcacgattcttgaatacgctcatgacctcggcatgtatcatacgccgattgacagaatgggcatcccagaccggtttattgaacacggcagcgtaaccgccctgcttgaagaaatcggtctcacgaaggctgaggttatgaaccggatcaaactgctgatgccgccgaagacacataaaggaattggatcatgacagcaaaaaaagaacgattagatgtacttcttgtagaaaaaggccttgcggaaacgcgggaaaaagcgaaacgcgccattatggcgggcatcgtatactcaaatgaaaaccgattggacaaaccgggtgaaaaaatcgcccgggatcttccgttaacggtaaaaggaaaccctcttaaatacgtcagcagaggcggattaaagcttgaaaaagctctggaagtgtttcccgtctcggtaaaaggcaaaacgatgattgacatcggctcgtctacagggggattcacggattgcgccctccaaaacggagccgagcggtcctacgcagtggatgtcggctataatcagcttgcttggaagctcagacaggacgagagggtcgtcgtcatggaacggacgaatttccgctattccgagccttccgatttcacagagggtttgccggaatttgcgacaatcgatgtttctttcatctcactccgcctcattctgccggttttaaaaacgctgcttgtaccggggagcgattgtatcgcactggtgaagccgcaatttgaagccggacgggaatccgtcggaaaaaaaggcattgtcagagatcccggtgttcatactgacgttctccgccgcatgaatcaatttgccgcttctgaaggatatacagtgaaaggactgtccttctcaccgattacagggggagacggcaatattgagtttctgcttcatttggaatggggcggagaagacggaaacggcgctgaactgccggaagaagacattctccgtaccgtccgcgaagcacatgagacattaaaagccaaaaagacagatgtaccggaataatagggggctattattccttttttctgccatcatgtactttttatcaagaagcggttaacataatgacaagaacagcttgaaaacagaggtgcttacatgacaaaaggccaaaggcatataaaaatcagagagcttattacaagccatgagattgaaacgcaggatgacttagttgacatgctgagagaagaaggatataaggtaactcaggcgactgtctccagagacattaaagagctgcatctcgtaaaggtgccgacaaacaacggctcctacaaatacagcctgccggcggatcagcggttcaatccgctgtcaaaactgaagcgttcattaatggatgcgttcgtaaaaattgactcagcaagccatatgatcgtattaaaaacgatgccggggaatgctcaggcaatcggcgctctgatggataatctcgaatgggaagaaatcatgggcacgatttgcggagatgacacgatcttaatcatctgcaggacgcctgaagatacggagggcgttcaaagccgtcttttggagctgctgtagcgtaattatcagataaaaggtggaatgctgtttgttagctgaactatcaataaaaaactttgccattatagaggaactgacgatttcgtttgaacgggggctcaccgtcctgacgggagaaacaggggccggcaagtcaattattatagacgccgtttccctattagtcggcggccgcggctcgtctgaatttgtccgttacggtgaaacaaaggccgagcttgaaggactgtttcttttggacagcggtcatcccgtttttgaagtatgccgtgagcagggaatagacgcatctgacgacatgattgtcatgagaagggacatcaatgccggaggaaaaagcgtctgccgtgtcaacggaaaattagtgacgattgcggctttaagggaaatcggcagacttttattagatattcacggacagcatgataaccagctgttaatggaggacgacaaacacttggagcttttggataaatttgcgggtgctgaggccgaatccgcgcttcaggcttaccatgaaggctatgagcgttatatgaagctgctcaaaaaagtgaagaagctgtcagaaagcgagcaggaaatggcgcatcgattagacctgattcaatttcagcttgaagaaatcgagtcggcgaagcttgaattgaatgaagacgaacttcttcaggaagagcggaagcagatatccaactttgaaaaaatttatgaatcattgcaaaacgcctataatgcgctccgcagcgagcagggggggcttgactgggtcggaatggcctctgcccagcttgaagatatttcggatatcaatgaaccgctgcaaaagctgtctgaaagtgtgtcaagttcctattatctgctggaggatgcaacctttcagatgcgcaatctgttagatgatctggaatatgacccggaacggctgaattttattgaaacccgtttaaatgagatcaaacagctgaagcgcaaatacggagcgacggtagaagacattttggaatacggctccaaaatagaagaggaaatcgatcaaatcgagaaccgcgacagccaccttgaagcgctgaagaaggaattggagtcggtcggcaaagatgtggccgtagaagccgccaatttatcaaaaatcagaaaagcatgggctaagaaactggcggaagcgattcatcaggaattaaaaagtctgtatatgggcaaatcaacgtttgatacggaatttctcgtgaaaaccgatccgtcagccagtgaagcaccggttgttaacgggcagcccgtgcagcttacccaaaaggggattgaccttgtgaagtttttaatttcaacaaacaccggtgagcctttaaaaccgctgtcaaaggtcgcttccggaggcgagctttcaagggtgatgctggcgatgaagagtattttttcttcccagcaggatgtcacctccatcatctttgacgaagtggacaccggtgtaagcgggcgggttgcccaagccatcgcggaaaaaatccataaagtatcgaccggttcacaggtgctctgcattacacacctgccgcaggttgccgctatggcggatacgcaccttctgatcgcaaaagaattcaaagacggccggacgacaacgcatgtcacgccgctttctaaacaggacaaggtagcggaaatcggccgcatgattgcgggcgtcgaagtgaccgatctgacaaaacggcatgcacaagagcttttaaaacaggccggacaggtaaaaacgacaggataagctgctgatacaggcagcttatttttttgttccatttctctaacagtgtatccaatgtttttcttcgtatgccggttataaatcaagcgcaggaaggcaaaagtatagatgtagcagaaaaagaaagtggtgtgggataggagcgaggagagtgaaggaatgaatgcacgataacatgaggaaagcaataggtgtaattctccttgtttctttactaagtgtaggcttttttaagccatttaaagaatatttactgataccatcagaaatgagcgtctttgaaaaccagacacaggccgttccggtcaatgcatcaataagcgctgaaaagggcgaattatcagaagcctttacgctgaaagaagagcacggccatgcaaacataacagggcaaacacaaggccggtcagaagtagtatatgatcttgccggatttcccattaaaaaaacgaaagtgcgtgtccttccagaattgaaggtcattccgggcggacagtccatcggtgtaaaactgcattcagtcggtgttttggtcgtcggttttcaccaagtgatgacaaaggatggaaaaaagtctccgggagaacaagcgggaattgaatctggcgacatcattattaaaatgaacggacataaaattgaaaaaatgagcgacatcgccccgtttattcaaaaagcgggcaaaaccggtgaatctttggatttattggtgaaacgcgataagcaaaaaatcaaaacaaagctgattccgacaaaggacgaagccgaggggaaatatcgaatcggcctttatatccgcgattcggcagccggcatcggcaccatgacattttttgaaccgaaaacaaaaaaatacggcgcattgggccacgtcatctctgatatggatacaaaaaaaccgattgttgtagaagacggagaaatcgtccgttcaactgtaacatcgattgaaaaaggaaaaggcggcaatcccggcgaaaaactggcaaggttttcgtcagaacggaaaacgatcggcgatattaaccgcaacagcccgttcggcatcttcgggacactgcatcagccgattaaaaacaacatttccgacaaagcgcttccgattgctttgtcaaatgaagtaaaaaaaggacctgcgcaaatgctgacggttatcgaaaacgataaagtagagaaatttgatattgaaatcgtcagcaccacgccgcaaaaattcccggcgacaaagggaatggtgttgaaagtgacagatccgaaactgctgaaaagaaccggcggaatcgttcaggggatgagcggaagcccgatcatccagaacggaaaggtcgtcggagccgtaacccacgtatttgtcaatgatccgacaagcggctacggcgttcatatcgaatggatgctgtctgaagcgggtgttgatgtttacgggaaagacaaagcaagctgactgccggatgatccggcagtttttttatgtgatgcgttcttcacttctttcctggattcatgtaaaataagacatgaagatttttcgacaaattcacgtttcctgatttgtcaaacttaatttttagtcgaaaaacctagaaaatgctagaaaaacaaagatataccactattattggtaaatatggattttttaaaaggggaagtagtggttttgtcgaatgtaacatgtagcagtcaaatgggttgcgtcctgttaatacattgggggaggaagaaacgtggagaaaattaaagtttgtgttgctgatgataatcgagagcttgtaagcctgttgagtgaatatatagagggacaggatgatatggaagtgatcggcgttgcttataacggacaggaatgtctttctttgtttaaagataagaatccagatgtgctcgttttagacattatcatgccgcatctggacggacttgcggttttggagcgtctgcgggaatcagagctcgagaagcagccgaacgtcatcatgctgacggcattcggtcaggaagacgttacgaaaaaagccgtcgatttaggcgcgtcctatttcatcctgaagccgtttgatatggaaaaccttgtcggccatattcgccaggtaagcggaaatgtcagcagtgtcacacaccgtgcgccgtctgcgcaaagcagcattatccgcagccagcctgagccgaagcggaaaaatctcgatgccagcattacaagcattatccatgagatcggtgtgcctgcccatatcaaaggctatctttatttgcgtgaagccatttccatggtgtataacgatattgaactcctcggcagcatcacaaaagtcctttatcccgacatcgccaaaaaattcaacacgaccgcaagccgtgtagaacgggccatccgccacgccattgaagtcgcatggagcaggggaaatattgattccatttcttcactgttcggatatacggtaagcatgacaaaagcaaagccaaccaattcagagttcatcgcgatggttgctgacaagctgagattggagcataaagcttcgtaacgcaagcttttggctagatgtctttttcgcgccttctattccgtgcatgaacgcggaagagaaggcgttttgaaattttgctgacgaaaacaatggaaatcactcacgccggtacttgttctatacataaatgcgggatctatgccgtctacacgtataataccggagctgatattttaatgattttgccgtctctgaaataaaagcgggggacgcggcggcttaacacagataagacttcgtagctgatcgtaccgagcatttcggcaatttcatcaacggaaatctcggctccttgttgtttaccgtagatgacgacttcttctccttgtttgccctcattctcacctaaactgaccatgatcatatccattgtcactctccccgccaccggcacccgtctgccgcggtgaagaataaacccgcggttggacagggcgcgggagtaaccgtcagcatagccgattggaatcgtcgcgatgatttcaccaggttcggcgatatatgtggcgccataactgacggtccggggatctgtcaccatggctttcacataagcgatacgcgcctttaaacttagtgcgggtgtgagatccacgaggttcagttcctttatcgaggcggacggatataaaccatataacccaatgcctaaacggatcatgtcggcgctgaattccgggaatgcgatagcggcggctgtattgcacatatgcacggtaggcagcgtaatgtcttgattttttaaaaagcggagaaagctgataaacttttcgtgctgcagcatcgtcagctcagtgtccggttcatccgctgttgaaaaatgtgtaaagatcccatcccatgacagatatgtactcgacttgagcgctttcaccactgctaaaagatcttcttccgtacgcacacccagccggcccattcccgtatccacattgatatgaatggacagccgtttcgaatctgcttctttttccaatattcgattcgcttttttgatccagctgacttgaaacgctgataatgttatgttccaaacggcagattttttcacacagctgagagctgtgaagccgagcacaagaataggtgccgtaattcccgctctccgtaacacaattccctcttcgacacttgcgacagcgagctcgctcgccccgctttccagtgcctgccgcgctacttccacagacccgtggccataagcattcgcttttacgacggccataattttagacgtattcggaatatggcggcggatcgcccgtacattcttttttatcgcatcaaggtcaacttcaatccaaacttcccggcaaagttttttcatcacgattccttctttccttaatgagattcagtactcatgctttcaatctgcattctattcatctttaactgaaatcattcaaaacatggaaaggtgatcgctgatgtttaaaatcaagttttcgggaaatcagtgtgcctgctttatttatgcagttagggctgcttggcagcccttaaattgactttacaatattctgatctgaaaattgatgttcaaacattttggactggcttacagcattgttttgaatgacaatgccgatatttccccctcctgcaccgaaaacggtttttgatgcagtcagcggactgatggatatggcgccgccaacattgacaactccgtttcctgatacgttgtttatcgtaatcgggcaaccgctcattctattttttctcctttctctcacagtctactaactatatgtacgctgtgatatggaataagattaaacaaaacggcaaaaagaatccggctgctgccagccggaaagggagggaaatacggatgtcatagtgttttcgttacattttgatcagagtattgagagcttgaagattgagatgtgctggattgattcatttgcaggaccatccctgtatttcccccacctgagccgtagacggtttttgatacggttaaaggacttatcgaaaacgcaccgccgacattgacaaccccgtttccggaaagactgttaatcgtaataggaaaaccagccatcatatacggtctcctttctattaatctatttactatatgtacgctgtgtgttagaaataggagtaaacaaagcggtaaaaacttgtaaatcaaaaaaactgccggacatccggcagtttttttagtctacttttcaaacggcacccagccgcctgtattctgaatcatttcccataacggttcaggaagtcggtatttctcaatttcagatgcttgaatggctttttcgatttcctgttcgcggccttctttgaccagcaccgcccattcggggttaatcaaaatgacacgtcccagagccaccagcggaattccgctttctaatacagcaagcgcttcgtccgcggtatagatggaaccgacggccatcagcggcactttatggccgacgcgttcgtttaataaatccatccgcgtccgtgaagtatccgctccgcggcgggctttggaattgacatccatcagtgaaatatgcagataatccaagttctcttccgcaagcgcgtcagcgagcatgaatgtttctttcattgtaagccccggtgtttccggctcttccggtgacaggcggtagccgagaacgaatggattttcagcgtgtgtatcaattgcctgtttgacagcgtcaacgactgcaagcgggaacgcaaggcgcttttcatcgcttccgccccagcggtctgtgcgccggtttgttttcggtgaataaaattggtgaatcaggtacccgtttgccccgtgaatttcaacaccgtcaaagccggcttcaatcgctctgcgtgtcgcttcgccgaatgctttcacgatgtgctcaatttcttgttcggtgagagcccgggacgtttgtctcccgtcttcttctgagccgctcggactgacgacgtcgttgtttggcacgagttcaggagggcattccaatcctccgtggtgaatctgcacaacggctttcgctccttgagactggatcgcctgagcgagttttttcaagccgggaatgtgagaatcatcatagatgccgggctggcctggaaacgctttgccgtccggcgttacgtttgcacatgccgtaataaccatgcccatttcttttgaacggggagtaatgtagcttaattcacggtcggaaatcgttccgtcatcatttgatgaatagtgtgtcatcggtgcgactgaaatgcggtttggtatggtgacgccgctttcgaacgtaaaaggttcaaacagcggtttataagtttgcttcatcatttcgccttcttccttaggagtttaactcgtccgtattctagcttatgttttaattgtgtgcaattattttgcttgttcttcttcctgaggttatgaccggctgaaccatttaaacgaatgaaacggttttctccgttccttttcaggatctttatatcctcctgaaatttgatggccgatcgagctgaatatgacagcggcggcgaagaggagaatgatttttttcatatacatatcttctttcttatcttttacaaggttatttataagcatacgcttgtgcgaaaaaaccgtcaatttgtttttatttattcttttttccactttcctgcggcgaatatcgttccgatctgaatcacaacacttaacagagcgcacactgccacaactgtgttgctgtccatagaagacaccctcctttttgttaggttgatgtatcatatgacagctgtctctgttttgacaaaaccgtaatgcggtgtttcatatttttcaacacaaaaagggcgcttttttaagcgcctttacttttttttcagccggttcaaagcgatttgaacggcgatggcgtcatccaggtagccgatcggaaacatgtaatccggaatgacgtcggtcgctaaaatataatacagcagcgcgctcccgagaatcgcgcggtcttcagccggtgttgattcatccatatactgatgatgcatgtttttcaaatgatcaataaaagggccgacgctttcttcattgtccattttcttttgaaactcatcgcaaatcaggcgatggccctgctgggttttggcatattgttcatatctggtcagttcgcgctcaatttgctcccgggaaaaaggctgatcaaacatctcggccatattcagcatatcctgaatcgcgtgcatcgggtcttgcggcgcagcttctttttcatggccgatgtctatgcctgacgcctcaagcaattcctccagcggggtgcggagatgttttgaaaattcctgaagatgctttaaattggccttctgcttgccgtttataatccgggagatggtggccgtatcaatgtttgttaaggcgccgagttttctcatggagagcgagtgcttatcaagcagtgattttaaaaggggccccagtgtcgtatttttattttctgtcaagggtgtcacctcgtttccgccggaatgatgatcattaatcaataatttttgcagaaaaggtaccttttctgtgctgctgaataggatagtgtagattcaacggcacaacatgttgaaaagacatcaaagaatggagagaaacgaacatggcttggttattgattttaggtttggcagtgtcctcgagcattgataatttaggagtggggatgtcatacggcatcagaaaaatcaaaatatcgcatgcgtcaaatatgatgatcgcttttatctgttttgtattcagttatatcggaatttatttcggcaaatggatttcagccgttttaccgggctttcttcctgtattgctggcggcgtttattttatctgtcatcggtatccgcatcattctgctggctgtgccgagaaaaacagcgcgtgttggcgcgtcaggaaaaaaaggccgttttgccggtctgctgcaaaatccggaggcagcggatgccgacggttcgggagaaatcggtatattggaatccatggttctcggggtggccgtatccgcaaatgcgctgaccaacggattaagcgcggggttgatcgggctttctcccgctgccatttccatcactgcggcggtcggaagctttttgaccatatggatcggctgctcgcttggaaaaaaagccgcgtcattgcgcatcggttcttttcatgtcggacagttcagcacggtgctgagcggagtgattattctcatcattgccgccaatacgctgctcttttaagttgtcccgttcattttatgaaaagctcaaaataaatatgaatgtttctattcgggagagcgcatgacgcggctctctttttttgccgatctgatattttttcaaaatgaacagaaagtcgtccgtttccgttaaattctgcatattcggccttcagacagaacttttttcatagactgatcagcttgttttctttctaagttcaggtaaacagcaggtcagatagccttcattccaaatatggaaaagcgctggaggaatggaggctccctttacaaatcggtcattctgttcaaagataaagccgaatgagaaaacgtgaggtgatctgtgtgaagtctgtcatacttctgatcttcaccgcatggctgttatcaggctgcgagtataccgcggaggctgatgcggcgccgtcatttacacaggaaggaacatttataaaagcggccggaaacgatacgatcgcggtcgaaattgacggagaaaggcaagaggtgaaggtgcctttcgctaagcggtttgaatgtcagtctctgcctgaacatacggcggtgcaaatcacctataaaaaagagagcaacggacaattacggcttgaggaactgaaaaaagaaacagatatgtgaaaacggggaggaaaaaacgtgggtttactgacaaaaagcgctgctgccttcggtgccgctcttcttctgcttgcgccgtctgcttatgcagctgaacctttgcaagggaaaaccatttatatcgatgccggacatggcggagaagacagcggggccggcggaaatggactgcttgagaaaaacatcaatttagcggtgtcaaacaaggtgatcgccaaattggagacagaaggcgcaaaacctgttgcttcaaggactgacgatacttttttacgtttggacgagcgggtggcgaaagcaagcgccagccaatccgatttattcgtcagcctccatacgaattcagccgtctcaacggcatcgggcacggaaacgtattttaattcgacatatgaaggagcagacagcgaaaggcttgcttccgacatccagcagcagcttgtcacgtctttagggatgaaggacagaggcgtaaaagaagctcctttttatgtcattacatattcaaagatgccgagtgtgctggctgaattaggttttatcacaaatcctcaagatgcggacaagctgaaaagcgataacggacaagagcacgccgcggacgccgttgtaaacggaatcgaaacctattacagcggacggtaattataaaatatgtgtaaatagccccctccttatgtgcataacgattataatagagaaaaccgatgacaaacacctgaggtgacacatatgacgaatatttttgcccaccggggggcgtcgggcgactgccctgaaaatacgatgcccgcgttcaaaaaagcgattgaggacggggctgacggaatcgaacttgatgtacagatgacaaaagacggccgtatcgtggtcattcacgatgaaaccctcgaccgcacgacgtctttgaaaggatttgtgaaagatacgacgtatgacaaaatcagaaccgccgatgccgccggaaaatggaaagatgcttttaaaggtgtcagaattccgcttttgtcagatgtgctgcgttttgcggaacgtgctgattttctgataaacattgagctgaaaaacagtgtattccgttacgaaggaatggaagaagaagtgattaaaaaagtcagatattacggactggaaaagcgcgttattttttcttcatttaatcatgagagtcttgcggtttgccacgccttggcgcctgaaattgaacgggcggtgctgacaatggatgtgctgtaccggcctgaacggtatcttgccgccattcccgcttcgggttatcatccgaagctcggtacgccggcggtgagcgctgaagtgatcaaacatcttgcaaaacaccaagcggcgctccgtccgttcaccgtcaatcgtcctgaggatatgaagcagctgatgaaagcgggagcagacgcaatttttaccgattatccaaagctggctgtttctataaaaaaagaatgccgcagctgagaagactgttcagacagtcttctttttttatgggcgggaaagaggcggtgcactcataactcggtcagccggttcatatattgtaacagggcgttttgtgtaagcgttatcttttatcttattgaaagtgaggcaaaattgtgggaaaaacggttatcgtcagtgcggcaagaacgccgttcggaaaatttggcggcgcattaaaagaggtaaaggcggccgagcttggcggcatcgccataaaagaagcaatcaagcgcgccgctatcagtgaaagcgaagcggaaggaacggtgatgggaatggtcgtccaggcgggtgccgggcagattccggcacggcaggctgcaagatatgccgggctcccgtggtccgttccggctgaaaccattaataaggtctgtgcatcagggctcagggccgttaccatctgtgatcaaatgatccgggcgaaagatgcggacgtgctgattgcaggcggaatggaaagcatgagcaacattccgtacgccattccggccggccgctggggtgtgaggatgggggacggggtgtttcaggatttaatggttcatgacgggctgacctgtgcgttcgaccaggtgcatatggctgtccacggaagcactgcggccaaaaagtacggcatttcccgggatgaacaggatcattacgctcttttgagccagaaacgcgcggctgaggcggccgaggcgggcaaattgcgtgaagaaattgtccccgtcacctggaccggcaaaaagggcaaacagcataccgttgaagcggatgaggggctgcgccctgatacgagccttgagcagcttgcagcgctcaagccaatttttacagccgacggaacggttacagccggaaacgctcccggtgtaaatgacggggccggagcatttgtgctgatgtcagaggaaaaagccgcgaagcagcatgtcaggccgctcgcagcgatacttggctttgcgtcagtcggactggaagcgtgcgagctggcaagcgcgccgggagaggccatcagccggctcttgacaaaaaccggactgtccgttgacgatattgatttgtttgaagtaaatgaagcatttgcgtccgtcgtgctcgtgagtgaaaaaatagccgggttcagccgggaaaaagtgaatgtaaacggaggggcaatcgcgttcggccacccgatcggcgcaagcggagcgagaatcatcatgagtttaatatacgaattaaagcgtcgcggaggaggtttaggcatagcggctatatgcagcggagcggctcaaggagatgccgtcctgcttgaggtgtactgatcaaaggagggagcgccggatgaaaatgaaaacaatcatggtcgcaggtgccggtcagatgggagcaggcatcgcgcagacggctgcagaagccgggtttgccgtcatgttatacgattgggagccggaaacggtaacaaaaggtcttcaccgcataaagacaaacctggagaaagagcaggcaaaaggacggaagtcacggcaggagacagatgccgttttcagccgtatttccccggcagaactcacagaagcgggagatgctgattttgtaattgaagccattgccgaaaacaaaaaagcaaaagcagaattgtttgacacactagataaaatctgtccccctcatgccgtattggcaagcaatacgtcttctcttcccattacggagcttgccgcggccacaaaaaggcctgaaaaagtaatcggcatgcattttatgaatccggttcctgtcatggagcttgtcgaagtcatcagaggactcgccacatcggaagaaacggcggaaacagtaaagaagcttgccgtccggatgaataaaacccctgtcgaagtcaatgacttcccgggctttatatctaatcgcatattaatgccgatgattaacgaagccgtttattgcctttacgaaggagcagcttcaaaggaagccattgatgcggtgatgaagctcggcatgcggcatccgatgggtccattaacattagctgacttcatcgggctggatacgtgcctttccattatggaggttctctatgcggggctcggagatccgaaataccgcccatgccctctgctcagaaaatatgtcagcgccggctggctcggcaaaaaaagcgggcgcggtttttatgagtacggcagatgacgtaaagatcatgaggggagacggcagccatgcattttacagaagagcacatcatgatgagaaaaatggtgcgtgattttgcccgcaaggaaatcgcgccggtggttgagctcatggaatcaacagatgaatttccggagcggctgattaaaaaaatgggcgaagcgggattgatgggcattcccgtcccggaaacttacggcggggcgggtgctgatacaacatcttacattttagcgattcatgaaatatcaaaagtcagcgcggccgtcggcgtcattttatccgtccacacatcggtagggacaatcccgattttgcatttcgggacagaagcccaaaaacaaacgtatattccgaagctggcagcgggcgaatatattggggcttttgcgcttactgagcctcaatccggatctgatgcgggcagcctgaaaacaacggccgtgcgaaaaggcggttcatatattctgaacggttcaaaaatctttattacaaacggcggagcggcagatctgtatctgacattcgccataaccgatccgggtaaagggagaaagggaatttcagcgtttatcgttgaaaaaaacacacccggtttttctgtcggaaaaaaagaaaaaaagctcggactgttaggttccaatactgtcgaattgcagtttgaccaagcggaaattccggttgaaaaccggctcggcgaagagggtgaaggcttttcaatcgccatgaaaaaccttgacgtcggacggatcggcatagcggctcaggcgctcgggattatcgaagcggcgctcggctgctcggtggagtacgccaaaacccgcagccagttcggcagacccatcgcttcgaatcaggccgtttcatttaaattatctgacatggcgacgaatgcggaagctgccaaattattggtctatcatgctgctgatctgtatcagcgagggcttccgtgcggaaaagaagcatctatggcgaagcaattcgcgtccgatgcggcgatgaaagcggcggtggaggctgtgcagattcacggcggctacggctatatgaaagagtatcccgcggagcgtttatttcgggatgcgaaagtcacgcaaatctatgaaggaaccaatgagattcaaaggctgattatttctaagtatcttcttcaataaaaagtgcgcaaaggagcgaaaccatggaatcttattctcccggtttagatggcgtcatagcggtggaaacggggatttctttcctggatacacagcagggcagtattttaatcaaaggccacgatctgattgagctttctaaaacggccggctatatggacattgttcatctcttattggaagacagacttcctgatgcgaaagagaaggcggcgcttgaagaagacgttcggcgcggcgggcaccttcccgaggaaatcttgcacatatgccgtctgctgcctgaacatactcacccgatggacggactgaggacgggtttgtccgcgcttggaggctttgacaaggacatcgatgaccgttcatcttccgtaaatcagcaccgcgtacgcggactgataggcaaaatgccgaatctgacggtcaacagctatcgagtcatcaacgggctggagcctttggcgccggtcggaaccttatcatacagcgcaaactttttatatatgattaccggaaaaacaccgtcatctttggaagaagaaatcttcgacaggtcgcttcttttatacagtgagcatgaattgccgaactcaacgtttacggcccgtgtcatcgcttcgacgcaatcggatatttacggcgcgctgaccggagccgtcgcctcgcttaaaggaaaccttcacggcggagcgaacgaagcggttatgtacatgcttgaggaagcgaaggatacagacgggtttatacaattattaactcaaaaactcgcaaacaaagaaaaaatcatgggcttcggccaccgtgtctacatgaaaaaaatggacccgagggcgctcatgatgaaagaagcgttaaaaaagctgtctgatctttcaggtgatttccgtctttatcatatgtgtgaagccggcgaaaccgtcatgcgggagaaaaaaggcctttatccgaatttagattactacgcagcgccggtctattacatgctcggcatcccaataccgctgtacacgcctatattcttcagtgcacggacggtcggattgtgtgcccacgtcattgaacagcacagccgaaaccggcttttccgcccgcgtgtccgctataccggagcgcgcctgtaaacagatgagaaaggaagatgaaaacatgacagaaccccgccgaatggacgctgtaatcgaagagatttctgactacgtgctccatcaggagattgacagttcagaagcttttactacggcaggacatgtgcttcttgatacgataggctgcggaattttggcgctcagctatcccgaatgtacaaagctgctcggcccgattgtcccgggaacctccgtccccaacggcagcagagtcccgggcacgccttttgttttagacccggtcacggctgcttttaatatcggctgtatcaacaggtggctcgattataatgatacgtggcttgctgcggaatggggtcatccgtctgataatctcggaggcatattggcttgtgcggattatatatccagagtgcggatttcagaagggagagaaccgcttaccgtgcgtgatgtgctttgcgcaatgatcaaagcgcacgaaattcaagggattctcgctttggaaaacagcttaaacagagtggggcttgatcatgtgctgtttgtgaaagtggcgactgcggctgtttgcgcacaaatgctgggcggctcaagagaggaaatcaataacgccgtatctcacgcttggattgataattcaagcctcagaacgtatcgtcatgcgccgaacaccggatcacgcaaatcatgggcggccggcgacgcgacgagcagaggcgtatatttggcccttatggcgcaaaaaggtgaaatggggtacccgacggctctgaccgcatctgggtggggatttcaagacgtattgtttaaccggcaggaaatgaagcttgcccgcccgcttgggtcctatgtgatggagaatgttttgtttaaagtatcctacccggctgaattccacgcccagacagcggcggaatgcgcggtccggcttcatccggaggtgaaagaccgcatcgaagacattgataggatcacgattatgacccatgagtcggcaatccggattatcgataaaaaagggccgcttcacaatccggctgaccgggatcactgcctccagtacattacggcaatcgggctgcttttcggagatatcacggcggatcattatgaagaggaaacggcgtctgacccgcgaattgatacattgcggagtaaaatggaggtgacggaacacaaagcgtactcaaaagattacttagacccgaataagcgatccatatcaaatgccgtacaggtgcattttacagacggcacggctacgggacggattgaatgtgaatacccgctcgggcaccggttccgcagaaaagaagccgttccgaagattcttgccaagttttcagcaaacatcagcactcatttttcattgaagcagcagcgtaaaatcgaagaggcctgcgaacacagcggccgaatgcagaagctcagcgtcagtgaatttatggacttatttctcgtataaaataggagggtgacaaacatgacgtggatcgtcagcaagcagtcgtctcaagaggagcttgcagagcggttccgtacgctgatggcagcgccggatctattgcagatccccggcgctcacgatgcgatggccgctcttatcgccaagaaaacggggttttcggctctttatttatcaggcgcggcttacacggcgagcagagggctgcccgatttagggatcatcacgtcggcggaaatggctgaacgggttaaagatttggtccgctcgtctgatctgcccgtccttgtcgatattgacacgggtttcggaggagtgctgaatgccgcccggacggcgaaagaaatgtatgaagcgcgcgcggccgccgtccagatggaggatcagcgcctgccgaaaaaatgcggacatctgaatgggaagcagctcgtgccgattgaagaaatggcacaaaaaatccaagcggtcaagcgggccgcgccaactcttcttgttgttgcgagaacagacgccaggcagcaggaaggattggagggggcattaaaaagggcgtccgcttatataaaagcgggtgctgacgctgtttttccggaagcgctccaatccgaaagtgaattcagagcgttttccaaacaaatcagtgtgccgattctcgcaaacatgactgaattcggaaaaacgccgtattacagtgctgatgaattttccgatatgggctgtcagatggtcatttacccggtcacgtcactcagaacggcggccaaggcttttgagcgcattttccgccttctgaaagaagaaggctcgcaaaaagaggggctttctgatatgcagacgagaaaagaactatatgaaacgatcgcttacgatgactatgaagaactggatcaatccattgccaaaacaatactgccggacgactgaaaaagccctttttttgcaagggctttttttacagcttttttttcctgaaccgcgggctgacttgattgcgtttccgatctctgtacagaataaatccggccagaacataaaggccgaacaaaaaaaacgccaatccggccgccccctgaagaaaaagggacggaaacggggaaaacgcatgcccgaataatgcatctctcatcagcttaatgccgagcgccgcgacagcgccggggaggaccagaattaaaagcgcaacaagccggctcatattcagaaaacccctttacgatatgttttcctttattgtccaatcgaaaaaatattttgtcaagagatcaaaacgtggtaacataggggttgtgcaaattattgcaacgggaaatacaggtgtgcaaattttttcatataaaggggtatcgggatgcagaaggtgctgattataggtgctggtaaaggaggcacggcgctcctacagattttgatgaaaacaaagctgatccggattattgcggtggttgatcaagatccggaggcgcaagggctgcaagaagcccggaaatatggaattgcaacctcatcagattggaaaccctacataactgaagatatagatattatcatccatacaacaggcgataaagcggtcatggatgagctgctccatgagaaaaaagaacaaaccatcgtcatgccgggaaaattggcgtacatggtgtttcagctgatggaggaaaaacagcagcttatccaaatgctgaagtcgcagacgtataagcatgaccggatttttaattcaacgcacgacggcatgatttttatagacgtcaacgaaacgatcattttatttaatcagatggcagaaaaaatggtcggccaaaaacgggaggatgtcatcggccgccaaattaaagatgtagtgccgaacacaaagctgccgcggattctggaaacgagagagccggaatataaccagaagcagcttctcggaaagcacctgcagattgtcacgacaagactgccgatcattgatgaaggcggaaaacttctcggcgcgttatgcgtgtttaaagatatcaccgacgcagttgaactggcggaagaggtcacgaacttaaaacaaatccgcaccatgcttgaagcgattatacaatcgtcagatgaggccatttctgtcgttgatgaaaacggcatcggaatgttaatcaacaaagcgtatacaaaaatgaccgggctgtcagaaagcgaagtcatcggaaaacccgcttccaccgatatctcagaaggggagagcatgcacctgaaagtattggggacaaggcggcccgtgcggggtgtgagaatgaaggtcggccccaataaaaaggatgttatcgtaaatgttgcccccgttattgtggacggtattttaaaaggcagcgtcggcgtcatccacgacgtgtcagaaattaaaacgctgactgctgagctgaatcgggcgcgccagatcatccgcacgcttgaagcgaaatacacgtttgacgacattatcggcacgagtgaacaaatgctggtcgcccttgaacaggcgaagctcggggcgaaaacgccggcgacgattctgctgcggggagaatccggcacaggaaaagaacttttcgcccacgccatccataatgaaagcgaccgaaaatacaataagttcattcgggtcaattgtgcggccctgtctgaatcactgctagaatccgagcttttcggctatgaggaaggcgcgtttacgggcgcgaggcgcgggggcaaaaaaggactttttgaggaagcgaataacggcagcattttcttagatgaaatcggagagctgacccaaagcacccaggcaaagctgctcagagttctgcaggaaaaagaaattatcagagtcggcggcgctaaagcgatttctgtcaatgtcagaattatcgcagcgacaaacgtcaacatcgaaaaggccatggcggaaggcgcgttccgtgaagacctgtattaccggattaaccgctatccgatctcaatcccgccgcttcggcagcgcaaagaagatattgaagcgctgagcattcggctcattgaaaaaatcaatcaggattacggccgcaatgtaaaggggctcacgccgaacgcgctgcgagctttatcagcctacagctggccgggaaacgtccgggagcttgaaaatgttctcggacgggcaatgatttttttagagccgcacatggaacggatcgaacagcagcatctgcctgtttttgaatcagagctgaatgaaaaaaacggcacccaaagtgattttccggatgtggaaggggaaaagctgtctcaggctgttgaaaaatttgaagcgcacgtcattcaaaaaacgcttgaaaagcataaattcaaccgaaccaaaacggcaaaagcgcttggtgtcagcattcggaatctgtactacaaaatggacaagtacggccttgcaaatgacggcatgcaataaattgcagagaaagcgcaaacagctgcatgctttcttgaaaaaagccggaataaaccctcccgcacatttggcacggaacttgcattgttaaaagcggattcgcacaaggaaggtggtacaaaatgaagctgagagacctagttgaaaaagccgcggcaaaaaacgcaaaaaccattgcagtggcccacgcagcagataaagaagtgatccaggccgtcaaaatggcggcagaacacttgtcggcacgatttttactgacgggtgacagcggaaagctgaaagagcttctggcaaatgagccgaagttcaatgctgaaatcatccacgccgattcacccgaagaatctgcggcaaaagcagtgcgcgcagtgcgtgaacaagaggcggacgttttaatgaaagggaatctcccgagctcaactcttctgaaatcggttttaaaccgccatgaagggcttcgttcaaaaagggtgttatcacatgtagccgtttttgaggtgccggactatgaccggctgatgtatgtgactgattcagcgctgaacattgccccgtctcttgaagagctcgggcatattctgcaaaatgcggttcatgtcgcacattcagtagggaatcctatgccgaaagccgcagtccttgccgctattgaaacgattaatccgaaaatggaggcgacgctgaacgcggctgcgatcgtccagatgtgcaatagaggacagattaccggctgcattgcggacggaccgcttgctttggataatgccgtatctcaagcggctgcgctgcaaaaagggatttccggaagcgtagcgggccaggcggatattctcttggttccttcaatcgaggccggaaatatgctttataagtcaatgatttattttgcgaaagcaagtgttgctgccgtcatcgccggtgcaaaagcgccgatcgcattaacgagcagagcggataccgcagaaaataaactgtattcaattgcgcttgcgatttgcgcatcacaagaacagtaggaggaacgaacctatggaaatttttaaatatatggagacttatgattacgaacaattggtattctgccaagatgaacaatccggattaaaagcgatcatcgcgattcatgatacgacgctcggccccgcactcggcggaacaagaatgtggacatatgacagtgaagaagcggcgattgaagatgcactaagactcgcaaaaggcatgacttataaaaatgcggctgccggtttaaacttaggcggcgggaaaaccgttattatcggagacccgcgcaaagataaaaatgaagaaatgttccgcgcgttcggccggtacatccaaggcttaaacggaaggtatattacggcggaagacgtcggcaccaccgttgaagatatggacatcattcatgatgaaacagactatgtaaccggaatttctccggcattcggttcatcaggaaatccgtccccggttacggcgtacggcgtctacaaagggatgaaagccgcagcgaaagcggcgtttggcactgattccctggaaggtaaaacaattgccgtgcaaggcgtgggaaatgtggcttacaatctatgccgccaccttcacgaagaaggcgcttctttaatcgtaacggatatcaataaagaatctgttaaacgtgccgttgaggacttcggcgcccgcgcagttgatcccggcgacatttactcacaggcgtgcgatatttatgccccatgtgctctcggcgccgtcattaacgatgacacgattaaacagctgaaggcgaaagtcattgcgggagcggccaataaccagctgaaagaaacacgtcacggcgataccattcatgaaatgggaatcgtgtacgctccggattatgtcatcaatgcaggcggcgtcatcaatgtggccgatgagctttacggctacaatgctgagcgggctttgaaaaaagttgaaggcatctatgcaaacattgagcgggtgctcgatatttccgcgcgtgacggcattccgacatacttagcggccgaccgtctggctgaggaacgaattgagcgcatgcgccgttcaagaagccagtttctgcaaaacggccaaagtatattaagcagacgataggaatttgatctggaggtatgaaaatgttcgaaaaggaaaaacgcattctcattctgaatccaggctcaacatcaacgaaaatcggtgtctttcacaatgaacgctgtatctttgaaaagacgctgcggcatcccgaagaagagctgaaaacatttaacagcatcatcgaccaatacgaatttcgaaaaataagcattcttgagtctttgcacgaacagggcatcaacatttcaaagttcgatgccgtttgtgccaggggcggcctgctcagaccgattgagggcggcacatatgaagtgaatgacgccatgatcactgatttgaaaaacggctacaacggccagcatgcttctaatctgggcggaattattgccagggaaatagctgacggattaaatatccccgcgtatatcgtcgatccggtcgtggtggatgagatgactccgctcgctaaagtatcaggaatgcctgagatcaagcggaaaagcattttccatgctttgaaccaaaaagctgttgcccgtcaggcggcggcgtccctcggcaaacggtatgaacagatgaagatgatcgtcactcatatgggcggcggcaccacagtcggtgtccatgattgcggacgggtgacggatgtcaacaacgggcttcacggagaaggacccttcagcccggagcgcgcgggaactgttccggcgggtgatttggtagaaatgtgtttttccggcaagtattcaaaagccgatatgatgaaaaaacttgtcggcacgggcggactctccggctacctggggacaacggacgcggtgaaggtggaaaaacgcattcaggccggagatgagcatgcgcgtctcatttatgacgccatggcttatcaagtagcaaaagaaatcggggcggcaagcgccgttttaaaaggaaaagtagacattatcgtcctgacgggcggattggcgtacgggaaaagtttcgtatccgccatcagatcgtacatagattggatttcggatgtactggtgtacccgggagaaaatgaactgcaatctctcgcgcaaggcgcgcttcgggttttagccggtgaggagcagtcaaagcaatatcagatcggcgaaggagtgaaaacaaatggcgactgagtatgatgtggtcattctgggcggcggcacgggcggttatgtagccgccatcagagcggcccagctcggcttaaaaacggccgttgtagaaaaagaaaagctcggcggaacatgcctgcataaaggatgtatcccgagtaaagcgctgttaagaagcgcggaagtgtaccgaaccgcaaaggaagcggcagcattcggcattgaaacggaaggtgtctccctccgctttgacagcgtgcaaaaacgaaagcagggaatcgttgaccggctggccggtggtgtcgcccacttgatgaaaaaggggaagattgatgtattcaacgggtacggacgtatgctcggcccttccatcttctcacctctgcccggtacggtttccgtcgaatacgcaaatggtgaagaaaacgacatgctgataccgaaacaattgattatcgcaaccggttcaaggccgaaaatgctgccgggtttagaagcagacggtacatatattctgacatcagatgaagcgttagagcttgaacgtctgccccaatccatgatgatcgtcggcggcggtgtcatcggaattgaatgggcctccatgctgaacgatttcggcgtcaatatcactgtgattgaatatgcggaccgcattttgccgacggaagaccgtgatatttcaagcgagatggaaaaactgttaacgaaaaaaggaattaagatcgtgacgggtgcgaaagtgcttccggatacattggaaaaagcggacggcgtttcaattgccgctgaaaagaatggaaaaaaagaaacgtatcacgcggaacaaatgcttgtttccatcggccgccagccgaacattgaagggatcgggcttgaaaacacggatattgaagcggaaaacggttctatcatcgtgaacgaagccgggcagacgaaggaatcgcacatttatgcgatcggtgatgttgtcggcgggctgcagcttgcgcatgtggcctcccgtgagggcatcattgccgttgagcatatggcgggtcttaatccggctccgcttgatgccgctcttgtgccgaaatgtatttattcaaatccggaagcggcgagcgtcggtctgacagaagaggaagctcttcgaaaagggcatgaactgaagatcgggaagtttccgttcatggcgatcggaaaggctcttgtatacggagaaagcgacggctttgtcaaaatcgtcgccgatcggaatacagatgatattctcggtgttcatatgatcggcccgcacgtcaccgatatgatctctgaagcggggcttgccaaggtgctcgacgcgacgccttgggaaatcggccagtccatacatccgcatccgtcgctttcagaggcgattggagaagctgcgttagccgcagacggaaacgcgattcatttttaaaaggaaagaaggaggggtttgaatgactacaaaccgccatcaagcattagggctctctgacgaagaagccgttgaaatgtatagaaccatgctgttagccagaaaaatcgacgaaagaatgtggctcttaaaccgctcgggcaaaattccgttcgttgtttcatgtcaaggacaggaagcggcgcaagtaggcgcggcctatgccttaaaccgtgataccgactatgtgcttccgtactacagagatataggggttgtgcttgcattcggtatgactgcaaaggatttgatgatgtcgggttttgcgaaagcagctgacccgaactcaggcggaaggcagatgccgggccacttcgggcaaaaggaaaacagaatcgtaacgggctcatcccctgttacgacgcaggtgcctcacgcagtcggaatcgcgcttgcgggacgcatggataaaaaggatatcgtctctttcgttacctttggagaaggatcttccaaccagggggattttcacgaaggggcaaactttgccgccgtgtataaactgccggtcattttcatgtgtgaaaacaataagtatgccatttctgtcccgtatgacagacaggtggcgtgcgagaaaatatccgaccgggcggcaggctacggcatgccgggagtcactgttgacggaaatgacctgctggaagtttaccgggccgtaaaagaagcgcgcgaacgggcgtctaaaggcgaaggccctacattaatagaaacggtttcctaccgtttgacgccgcattccagtgatgacgacgacagcagctacagagaacgcgaagaagtagaagaagcaaagaaacaagatccgcttcttttatacaaagcatacttgcaagaagccgggcttctaggtgaagaagaagaaaagaccatgctgaatgacatcatggctatcgtaaacgaagcgacagacgaagcggagaaagcgccatacgcatctcctgaatcaacgcttgatcacgtttatgcgaagtagggaggaatacttatgtctgtaatgtcttatattgacagtattaatgcagcaatgaaagaagaaatggaaagagatccgcgcgtgtttgttctcggggaagacgtcgggagaaaaggcggcgtgtttaaagccacggcgggtctctatgaacagtttggagaagagcgggtgatggatacgccgcttgctgaatcagccattgccggtgtagggatcggcgccgcgatgtacggcatgcgcccgattgccgagatgcagtttgccgatttcattctgcctgcggtcaaccaaatcatttcagaagcggcaaaaatacgctaccgttcaaacaatgattggagctgtccgatggtcatcagagcgccttacggcggcggcgtgcacggcgcgttgtatcattcccaatctgtggaggctatttttgccaaccagccgggccttaaaattgtcatgccttcaactccttatgacgcaaaagggctgttgaaagctgcagtccgtgacgaagatccggtgctgtttttcgaacataagagggcgtaccgtctgattaaaggcgaagtccctgcggatgattacgtccttccgatcggaaaggcggatgtaaaacgcgaaggtagcgacattactgttattacgtacggattatgcgtccattttgctctgcaggctgccgagcgccttgaaaaagacggaatttccgcacacgtattagatttgcgtacggtttatccgttagataaagaagccatcattgaagccgcgtctaaaacgggaaaagtattgctgatcacagaagatacgaaagaaggcggtattatgagcgaggtcgccgccattatttctgaaaactgcttatttgatttagacgcgccgatcaagcggcttgcaggtcctgacgttccggcaatgccttatgcgccgacaatggaaaaatacttcatgatgaatcctgacaaagcagaagccgcgatgagagaattagcggagttttaaagacgtaaggaggtttttgacatggcgattgaacaaatggctatgcctcagctcggagagagcgtgacggaagggacgatcagcaaatggctggtatcccccggtgatcaagtgaataaatatgaccccatcgcggaggtcatgacagataaagtgaacgcggaggtgccgtcttcttttaccggtacgattagagaacttgtaggagaagaaggccagactcttgcagtcggcgagatcatctgcaaaattgaaacagaagaaacggaaaccgaagaggcgccgaagcgggaagaagagcagaataccccttcagacaccggtgcaaaccgtcaaggtaaagatcagtcaaataaagcgcgttattcgccggccgtgctcagattagcgggagaacacggcattcagcttgaagaagttgaaggaacgggtgcaggcggaagaattacgcgaaaagacattcaaaaaatcattgattcgggaatgcagcagaagtcggaagcaccggcgccggtagccgttcaaacaacgcaacaagcgccgaaacaacagcaaaaacaagcaccggcacccgctctgtcagccggtgatattgaaattccggttacaggtgtcagaaaagccatcgccgccaatatgcataaaagcaaaacagaaattccgcatgcctggacgatgatggaagtcgacgtcacgaacatgacggcgtacagaaacagcattaaagactcatttaaacagaaagaaggcttcaatttaacgtttttcgctttctttgtaaaagcggcggcgcaggctctcaaggagttcccgcagatgaacagcatgtgggcgggagacaaaatcgtccaaaagaaagacatcaacatctccattgccgttgccacggaagattcgctgtttgttccggttattaagcatgctgatgaaaaaacgattaaaggcatagccagagaaataacggaccttgcgaaaaaagtgagaaacggaaaacttactgcggaagatatgcagggcggcacatttaccgtcaataacacgggatctttcggctcagttcaatctatgggcattatcaaccatccgcaggcggcgattcttcaggtagaatctatcgtcaaacgtccggttgtcatgaataacgggatgatcgccgttcgtgatatggttaatctttgcctgtctttagatcacagagtgctcgacgggctcgtgtgcggccgattcctcggacgcgtcaaagagatcttagaaaacattgatgaacatacttccgtctattaaaaaaaactccttttgcccgggcggcaaaaggagtttttttattttcattgtgaatcctcgggaacaatcatagtgagatgatgttttttcacttcgagcgtacaaggtgttgttccgtatacctcgccatctgtatccgcgtccatctcacgtccggtttcgatttcaatcctggaggcctgaatataggacagctcccctttgaaatcatcaaacgaaccctgctccatcgtcatcagctcccgcaacgcggcaaggcttgtgttgcggcagattaacacatcggctaagccgtcctggaggctggcatcaggcaggggaactctgtttgtcccgatataatgcccattcatgacaagcaccattacggcttcgtcttctttcacctcgccgtcaatcgtcaatttgacaggaaacgggttcgcgcttgtcatcgtccgcaaggcgctcgtgaagtagctgattttaccaagccatgctttttcagtttcattaatatggcttgatgcttcggtgatcagtccgatgccccagaagttcagaaaatagccgtcatccgttttacagacgtcaatcatccgtttatgtccggccgcgagcacttcagcggccttttgaaggttttgcgggatgccgagcgcccgggagaaatcgttgcacgttcctcccggcaaaatgccgacagcgggtctgtgatcaagcttgctgatgctgttgatgcattgatgcacagtgccgtctccgcctaaaatatataaatggtcaactgaactgtcgagattttcacaatactgacgggcatcatcctgatgtttggtcggtttaatcaaaagttcatcagctgactgggccaaaatggggacgaccgtgccgagcgttttatcaatctgtttttgaccggcgtttccgttataaattaaaactgctttccgttggctcatatgactgctcctttatttcagacaatctccttaacaagtttcccgtttttaaagggtcataaacttacatcgggaacataaaagggacaaaaaacaattggatatgagcggtgtcatttgccgatagggaggttccttgctatcataagaagagatgatcaaaaaggagaggtcccaattgaatatggattttaatttatttatgaatgatgtcgtgcgtcaagcccgccaggaaatcacggccgccgggtatacagagctgaaaaccgctgaggaagtggacgaagcgctttcgaaaaaaggaacgacactcgtcatggtcaactctgtgtgcggatgcgcaggcggtattgcacggcctgccgcgtaccattccgtacattacgataaacgcccggatcagcttgtgacggtatttgccggacaggataaagaagcgacagccaaagcgagagaatactttgaaggctatccgccgtcctctccgtcatttgccattttaaaagacgggaaaatcatgaaaatggtggaacgccatgaaattgaaggccatgagccgatggccgtcgtcacaaaactgcaggaagcatttgaagaatattgtgaagaagtataagtgaaagaaaaaccccggagccaagcgcttgcggggtttttttatatggcatctgtataaatataaatatttatacatcggcgttcagctgtcactaacctgaaaaacaatgactataataaacacagaaaggaaaatatatttttcaaaaatagtattgcatcacaattaaaaagtgtttaaaatacaagttaacgaataaatattcaaatttaagagatcagtagatatgggggaaatgaatcatgaagaaatggctgttggtattagctgccgcatgtatcacctttgcgctgtccgcttgcggatcaggcaattcaggctcagagggcggaaagaacaagctgattatgggtacatcggctgactataaaccatttgaatataaagacggcgatcagatcaccgggtttgacgttgatctggcaaaagctctgggcaaaaagaccggctatgacgttgaggtgcaggacatggacttcaacagcctgattacagccttgaagtccaagcaggtagatatgattttatctggaatgacacctacaccggaacggaaaaagcaagttgatttttctgatatttattatactgctaacaatatgatcgttacgaaaaagggaagcagcatgaaatccctgaatgatctgaaaggcaaaactgtcggtgttcagctcggctccattcaagaggaaaaaggcaagaagctcgcttcgaaatacggttttcagctcgaagaccgcaaccggatttcagacttaaccgaagagatcaaatccgggcgttttgatgccgcgattatcgaagacatcgtagcacaaggctatttcagttcaaatcaagatctgcagggctttgcgtcagcagatgcgaaatcagacgaatcgggttccgcgattgcgttccgcaaagacagtgatctgacagcgaagttcaacaaagcgctgaaagaaatggagaaaaacggagaaatcgaaaaactgaagaaaaaatggttcaccaacgagaaataaaagaaagctcaacttttcgttgagctttttatcttgaataaagacaaaggagatcacacgtatgaatttggatttctcagcgacaatcccccaaattccttttatattggaaggccttgcggtcacattaaaaattgtgctcgtttcggcggtcatcggtcttgtattaggcatcgtgctcagcttatttaaaatcagcacgatcagtccgctgaaatggattgcggatttttatacttcgatattccgcggcacgccgctcgtgctgcagctgatgatcatctatttcggtatgccgcagcttctgggctttcagatcgatcaattttgggcggcggtcaccgcattatcgctcaattcagccgcttacgtctctgaaattatcagagcgggaatcaacgcaattgacaaaggacaaaaagaggctgccgtcgctctcggcgtgccgtacggaaaaatgatgaaagatctgctgctgccgcaggcgtttaaaaacatttctccggctattattaacgaattaatcaccttaacgaaagaatcggcgatcgtcacagttatcggtcttggcgacattatgagacgggcctaccagtccggcgccgcaacatacaactatttagaacctcttattgtggcgggcttaatctattacgtgctcgttttgatcttagcattcatcggaaaaggcgtagaaaggaagctgaaagccaatgattaaggtcgacaacctgtcaaaatcattcgggaaacatgaagtactgaaaaacatttcaacacagatcgaagaaggggaagtcgtcgctgtcatcggtccttccggttccggcaaatcaacgtttctgcgctgcttaaatctgctggaaaacccaagcggcggaacgattgccattaaagaaaatgaaattaccgcagctaaaacgaataaactgaaagtgcgggaaaatatcggcatggtatttcagcattttcatttgtttcctcataaaacggtgcttgaaaatatcacatacgcgccggtcagcgtgaagaaagagtctaaaaaggaggcggaggaaaaggcgtgcgccctccttgaaaaagtcggactgcttgacaaacagaacgactatccgaaccgtttgtcaggcggacagaagcagcgggtcgccatcgcgcgggcgcttgccatgaatcctgacatcatgctgtttgatgaaccgacctcggctcttgacccggaaatggtgaaagaagttcttgaggtgatgaaagagctcgcgcagacgggcatgacgatggtgatcgtaacgcacgaaatgggatttgccaaagaagtggcagaccgcgtattattcatggatgaagggacgatcgtggaagacgggcagccggaagaattttttctttctccgaagtcaaaaagagcacaggactttttagaaaaaatattataaaatatatctgtaagaaaagaagaagaatgctcttcttcttttttttgagaaagaaacaaacagaatggagcaagcaatgtttaaaatcggttaccgcacactaaagaccgcacttggaacggcgctggccatttatttagcccagctgttgcatctgcaaaacttcgcatccgcaggaatcatcaccatattgtgcatccagattacgcaaaagcggtcgcttcaggcctcgtgggcccgatttgccgcctgtttattggcgatcgtcttctcatatgtctttttcgggctgatcggctattatccgtttgcgatcggaatattgctggtgctgttcataccgactacagtcgttttaaaaataaacgaagggatcgtcaccagctcagtaatcattcttcatttatatatgtccggcggcattacgatggcgtttatctggaatgagttccagctgatcaccgtaggtatcggcgtcgcgctgttaatgaatctgtatatgccgagcctcgacagaaaactcgcggcataccggaaaaaaattgaggacaacttttccgtcatcttcgccgaaatcgaacggtatttgttaactggtgagcaagattggtcggggaaggaaataccggagacgcatcagataattcaagaggcgaaaaacctcgcctatcgggacgtgcagaatcatattttgcgccatgaaaatctttactatcattattttaagatgagacagaaacaatttgaaatcattgaacggctgctgccgaagattacctctatttcaataacggtggagcagggcaaaataatcgcccatttcatccatgaattaagggaagccattcatcccggcaataccgctcataaatttttaaaaagacttgcagaaatgagaacggaatttgaagaaatgccgctcccggcaacgcgcgaggagtttgaagcgcgggcggctttgttccacctcctcggtgagatggaacaatacctcgtgattaaaagttatttcaaaggcatcaagctgtaaaaaacatatggatcaatcgcatgagtcctcctttcattggtcattctaatgaaaaaaggaggggagcccatgcgattttttttattgtcagccgccctgctgctgtctccgctttggccgcttggcgcgaaccctttgccgggtgacccttatattatcgtcaataaagccacaaatgcgcttgctgttgtgaaggataaccgaatacaaggcatttatcaggtggcgacgggaaaaacggatgatttgacgcctgaaggagaatttacggtaacggtcaaagccgtcaatccgtattaccggaagaaaaatgtgaagggaggcgcgccggaaaacccgctcggcgtccgctggatcggttttgacgcgaaaggaaccgacggcaggatatacggcattcacggaacaaacagagaagagctgatcggggggtttgtatcaaacggctgcatccgtatgaaaaaccgggatgtcatccgtattttccggattatccctcccggaacgaaagtattgattacaaaagaaaaccgctcattcgaggaaattgcaatagagcggaaagccctcataaaaaagcaggaaacccccttgcaatgaggcgcctgcttttttaccgcaaatacatcataatgcctgagaagagggttgaaagtataaatacgcccaaaatgacgatgacggcgcttttcataaatttttgagacattgtttcactccttaagattactgtctatcattttaacgtgttttgcttgtatgaacaagccatatcctatggcggaaagcaggtggccgcgctatgaaaaaacttgatcatgtcggcattgccgtcagctctattgaagctgcgagaggattttacgaacggatgctcgggcttacgtatatgggagacgagctggtaagcggccaaaatgtgagagttgcttttttagaagcgggaggcacaaagcttgagctgattgagccgctttcggacgcgtctcccgtcagctcttttttacagaaaagaggcgaagggctgcatcatttagcattccgctgcgccgatatgaaggaaacgatcaaggagcttgaagcatgccgcatgactttgatccatcatgaaccgcaaaacggagcgggcgggaagaagatcgcatttctctctccaaaagaggcgaacggggtcctgattgagctttgtgaaacaattgaaaaaggagaaactcaagatgagcatgagtgatcatatcagacacttaaatgaaagacgttcctttttaacaaacggcggcggagcggaaaaaaatgaaaaacagcacaaaaaaggcaagctgacggcaagagaaagaattgactatttattggacgaagacagtttttcagagctgcagccgtttgccaaaagccgcatgcccggatgccagaatgctccgggagacggcgttgttaccggatacggcacaattgacggacggcccgtgtatttgtttgcccatgactttaccgtactcggcgggacgctcggcgagacacatgcggaaaaaatcgcggcggtaatggatctggcggcgaaaaataaaaccccgatcatcgggctgaacgactcaggtggtgcgagaattcaagagggtgtggtatcattaaatggatacggtcatatctttaggcgcaacgtcctttactcgggagtgattccgcaaatttctgtcatccttgggccgtgtgccggcggtgctgtttattcacccgcattgacggattttgtgattatggcggaacatacgtcgcacatgtttattacaggcccgaaagtcattgaacaggtgacgggtgaacagattgacgcggaaagtttaggcggtgcgggaatacataatgtgataagcggaaatgcccactattccgcacgaacggaaaaagaggctctttccgctgtgaaaaccctgctttcttatctcccgcacggcggacagacggcattgcccgttaaaaaggaagacgccagaccgttattaaacaccctcgttcccgcggacagttcgaaaccttacgatgtgttacaggtaataaaagagctggcggatgacggaacgttttttgacattcagccgtattttgccaaaaacattgctgtcggttttctgaaactcggacggcgtacagtcggtgttgtcgcaaaccagccgaaacacttggcggggagcctcacgattgatgccgctgacaaagcgtcgagattcatccgtttttgcgacgcgtttcatattccgttattgacgatcgctgatgttcctggatttcttccgggccttcagcaggaacatgcgggaatcatccgtcacggagcaaaattgctgtatgcttttgccgaagcgacggtgccgaaagtgacgctcatcatcagaaaagcttacggaggcgcctatgtcgccatgaattcgaaagggctcggggcagatcttgtattcgcctggcccaatgcggaaatcgccgtgatgggagcggaaggcgcggcgtcgattttatacagcagagacatacaggcttctgacgacccggagaaaacgaagcgcgaaaaaaaagccatatacgaaaaggaaaacgccggtccgtataaagcggcggcctgcggaatggtggatgatatcatccggccggaagactcgaggaaaaaattgattcaggcatttgacatgcttgcgcataaggaagaggaaagaccgaaaaaaaagcacggtaatataccgctttaaacggagggaactgaaaatggtaaacgaaaaacgtctgcttgaagaatttcttgaactcgttcaaattgattcagagacaaaacatgaagcggaaatcagcaaggtgctcaaacaaaaattcactgatttagggttgagcgtaaaagaagatgatacaaaagaagtgacggggcatggagccggcaacttaatctgtacgttaaagggcacaaaagatgcggatacgatttatttcacatcgcacatggacacggttgtcccgggcaaaggcgttaagccgattgtggaagacggctatgtaaaatccgacggcacgacgattctcggcgctgatgataagacgggtcttgccgcaatgtttgaagccattaaagtgctgaaagaacaaaacatcgagcacggcaccattgaattcattatcacggccggagaagaatcgggattagtcggggcaaaagcaatggatcgttcagacattaccgcgaaatacggttttgcgcttgattcagacggaaaagtcggtaacattattgtagccgcgccgacacaagcgaaagtgagagcaaccattttcgggaaaacggctcatgcgggggtagaaccggaaaaaggcatctccgcgattaccatcgcatcaaaagcaatctcaaaaatgccgctcggccgcattgataaagaaacaacggctaatatcggacgtttcgaaggcggcacgcaaaccaatatcgtctgcgaccaggttgatattctggctgaagcgcgttcattagtgcctgaaaaaatggaagcgcaagtgcagaaaatgaaagaagctttcgaatctgctgcagctgagatgggaggccgcgcggaagtggacatcgcggtcatgtatccgggtttcaaatatcaggacggcgatcaggttgtggaagtcgcgaaaaaagcggcggcaaaaatcggccggccgagcgaacttcagacaagcggcggcggaagtgacgcaaacgtcattgccggccacggcattccgacagtcaacctgtcagtaggctatgaacaaatccatacgaaaaatgaaaaaatgccgattgaagagctcgtcaaaacggcggaaatggtcgttgccattatcgaaacagcggccaactaaaaacgaagcacccagttgattgggtgcttttttcattcttcataataattggcttaaagccttgcagatacaagaaaaaaaccctgccggataggttccggcagggtttcagtattatgatttggcgggctccgcctgagccgcagcttgtttctttttatgatgcgtctgctgtaaaagtacattctgcactgtcaaaaatagtccgcttgtaaaccagtaaagcggcagcgcagccggtacgttaagtgaaaaaatggtcatcatgacagggaaaataaagaccatgatttttgctgactgcatcgcggccggattttgagcagccggtgaatatttctcgtttaatttttgggaaatataagcctgtaagaaatacatggcccccgcgcacagtgatacaagaatatcagaatgccctaagctgaaccacagaaatgagtgtgaagcgatttccggcgttgagcggatggcgtaataaaaaccgatcaaaatcgggaattgcaccagcatcggaagacatcccattgccatcggattcagattgtgctcacggtaaagcttcatcatttccatttgcagttctttttgtttctccgcatctttcgtttgtttcattttagcctgaatgctgtcgacctgcggtttgatcacagccattttttcctggaacacccgctgtttcttaaattggttcacaaacaaaggcaatacaacgatccggacgataatcgtcaccagaataatcgacaatccgtactcaccgtggaacaggcccgccacgccttttaaaagtgccgaaaacggctcgatcaggtaatcgtgaaaaaacccgatattcccgaggcctcccgtctgagtctgagatgtcgctgcaaaagccgagcggcctgtgcacagtacgataaaaaacaatccgaatgcgatccatttttgatatgttttagacaattatgtctcctcctttttatcttcacttgccgttataaaaggaggaagctgacatcttcatcatcattcgccggtgaattcatgcggatgactttacgtatccaagttgtaatgcgatgatatataataataagaaagtctgttcggttcagctgaacgactgcttgatgttcatctattcgtttcgttctccaatgctcgcctgcgcggcgctcacgcaaaagaaaagcgatgccgatcgcggtcagagcgggaagaataattgtgaaaaaatcgactaaaaataaaaagtcattcattgactcaagaatcattttatcacatccattcagctcttattttactacatatatataaggttgtctatgaaaggaaaggaggcgccgggagtggccggaaaagggagaattatatttcatatcgatatgaacagtttttatgcctccgtagaaatggcgtatgatccgtctttaagaggaaaacctatcgccgttgccggaaacgtgaaggaacggaaaggaatcatcgtcacctgcagctatgaagcgagagcgcggggcgtaaagaccaccatgccggtgtggcgggcaaaacgcctctgtccggaactcatcgtcgtgcctccgaattttgaccgctaccggagttcgtcaaaagaaatgttcagcattctgagggagtatacggatttagtcgagcctgtttctattgatgaaggatacatggatattacggacacaccgcacagccacagggcgtatgagacagccgaagacattcaggcgagactgcaaaaagagcttctgcttccgtcaagcatcggcatcgccccgaataaatttctcgctaaaatggcttctgacatgaaaaaaccgctcggcatcaccattttaagaaaaagagagctgccggacgtattatggcctcttccgattgaagagatgcacggtataggaacgaaaactgcggaaaaaataaaaacgctcggcatcaaaacgatcggtgatttggcaaaaggagatgaacatgcgctgaaaacgcttctcggcataaacggcccgaggctgaaggataaagcgaacggcatccatcctgcagaagtcaatcccgagcggatttatgaatttaaaagcgtcggcaactcatccaccctgtcgcatgactcggctgactgggatgaattaacgggcgtgtttgaccggctcgcgctgtctgtgagcgaacggctccagcgtaaggaggtcatggcctgccggctgttcatcatgattcggtatgcggattggaaaacagtcacaagaagcatgaccctcagcaatccggctgatcagaaaaaagacatcatggaagcggcgatggaactgtttgacaagcactggaaccaaaacccggtaaggcttctcggcatcaccggaacggaactggttgaaaaacagcaggcgtataaacagcttgatctgttttcattcaaggaggacgcaaaggatgagccgatttttcagatgatgaacgagctgaatgaaaagtacggccaaaacctgatcagaaaaggcgccgttataaaaaaagaagaaagcaaaacaaggggaacgagctttaacagagactttttccaggatgaaaagaaaaggtgaataacttgaaaaaaggggttatgtatgataatttctttagtataaatatcattttattttaatttaaattttaaaatggttaaacgtttgaagaagggacgttagaatatgtcaaaacaacaaatcggagttatcggtcttgcggtaatgggtaaaaatctggctcttaacatcgaaagccggggattttctgtgtctgtatacaacagatcaagcagcaaaacggaagagtttttagaagaggcaaaaggcaaaaatgttgtcggtacatacagcattgaggagtttgtccagtctcttgaaacaccccgtaaaattttattaatggttaaagcgggaactgcaacggatgcgacgattcaatctcttcttcctcatctggaaaaagacgatattttgattgacggcggaaatacatactataaagatacacagcgccggaacaaagagcttgccgaaagcggcattcactttatcggaacgggtgtatcaggcggtgaagagggagcgctgaaagggccttctattatgccgggcggccaaaaggaagcgcacgaactcgtaaaaccgattttagaagccatttctgctaaagtggacggagaagcttgtacgacatacatcggcccggacggagcggggcactatgtaaaaatggtgcacaacggtatcgaatacggtgacatgcagctgatctctgagtcatatttcattttgaaacaggtgctcggactgtctgccgaagagcttcacgaagtattcgctgagtggaacaaaggagagcttgacagctatctgatcgaaatcacggctgacattttcactaaaaaagatgaagaaacgggcaaaccgcttgttgacgtgatccttgataaagcaggccaaaaaggaacgggtaaatggacaagccaaagcgctcttgacttaggcgtgccgcttccgattatcactgaatctgtttttgcgcgtttcatttccgcaatgaaagaagagcgtgtgaaagcaagcagccttctgtccggaccagacgttaagccggtcactgaaaataaagaagaactgattgaagcggtcagaaaagcgctcttcatgagtaaaatctgttcttacgcacaaggcttcgcccaaatgaaagccgcgtctgaagaatataactgggatctgaaatacggtgaaatcgcgatgattttccgcggcggctgtatcatccgcgcggcgttcctgcaaaagatcaaagacgcatatgaccgtgaaccggagcttgacaacctgctgttagacagctacttcaaaaacattgcagaaagctaccaaggcgcccttcgccaagtgatttcacttgccgtagcccaaggcgtgccggtaccttcgttctcaagcgcacttgcgtattacgacagctaccgtacggcagtgcttcctgcaaacttgattcaagcgcagcgtgattacttcggcgcgcatacgtatgaacgcacagataaagaaggcattttccatactgaatggatgaagtaatgaagaagcccccgcagttattgcgggggcttttctgatatcaaaaaccgcggaccgtcatgaacggcgccgcggtttttgatgttttcttatatattccaccagtggagaccgtctttttcaagaagatcgtccgaagctttcggtcccattgacccggcttcataattcggagaaagggttttgtcggctgcccacgtttcggaaatcacatcgacgaaattccatgaaagcgccacttcgtcccaatgggcaaagtttgtcgcatcaccgagcagacagtcatggattaatttttcataggcttccggtgtgttcatttcatcactgcagttgctgcagtaatccagcttaatcggctgagcatgagcggctccgcctaattttttagcattcagatatagtgtaatgccttcatccggctgaatatggatgacaagcaagttcggatttacattcgtttcattgccgtaataaaggttcatcggaatgtctttaaattgaacgacgattttcgttgatttttctttcatccgtttccctgtgcggatataaaacggaacgccggcccagcggaagttatcgatcaacagctttccggacacgaatgtttccgtattggaatccggtgctacattatgctcatctgtatagcttggtacggagtttccgtcaatcgttcccgcttggtattgtccgcggacgaagtagtcgctcacttcgtttggggcgacagggcggagagccctcagcaccttcactttttcgctgcggatttcttccgtgttcagtttaatcggcggttccatcgccaagagagcgaccatttgtaaaatatggttttgaaccatatcacggagtgcgcctgatttctcataatatcttgcacgatcctcaacgccgagatcctcacttgacgtaatctggatgtttgagatgtagcggttattccacagcggctcaaacagcgcattcgcaaaccggatgacttcgatattttgaaccatttgtttgcctaagtaatggtcgatccggtaaatttgatcttccgtgaaagcttcgcgtatttctttgttaagctctttcgcactcggcaggtcatggccgaacggtttttcaatgacgagacgggaccagccatttgtcgctgtgacaccttcgtttttaagtgattttgcgatagtgccgaaaaactcaggagccatcgccaagtaaaacattctgttgttcgggatttcatatgtatgttcaagctgatcaagcaggacattcagctcctgataggaacccggattcgttacatcaaacggatggtaataaaaatgagatgtgaaatcgtctatgtctttttgcccggcagaagaaacagacgttttaacggtttcccggagatcctcgtttgaccaaggtcttcttccaacacctacaactgcaaactcttcaccaatttgaccatttttatataaacggtgaatggatgggtaaagttttcgttttgccaaatcccctgtggcaccaaatattacaattactgcttttggtttgtcgtttgttttcacttagagtacctcactttatctgaagcatggtttaaaaccccgcatatttccttcattttaaatctaaaattcgttgaaagcaaacatttcagcctgttttttgcggtttgcggaaaaaaattaatcaggccggagaaggcccgggtgaattcacattttcagcctgatcctgtatccttagtagtacaaagatctaggaggaagcattgtggaattattatttttagggacgggggccggcatgccggcaaagacgagaaacgtaacgtccgtcgcgctgaagcttcttgaagaaaggcgttccgtatggctgtttgattgtggagaagccactcagcatcagatattacatacaacaatcaaaccgaggaaaattgagaagattttcatcacccaccttcacggcgaccatgtttacggtcttccgggtctgttggggagccgttcatttcagggcggtgaagaagagctgacgatttacgggccaaaaggcattaaagcctttatcgaaacaagcctgaacgtgacggcgactcatctgacgtatcctcttaccgtacatgaaatcgaagaggggacggtttttgaagatgagcaattcattgttaccgcagcatccgtcattcacggcgtggaagcgttcggctaccgggttcaggaaaaggatattcccggcgcattgcaggccggcagattgaaagaaatgaatatcccgcccggacccgtctatcagaaactcaaaaaaggcgaaacggtcacacttgacgatggcagaatcattaatgggcgggattttctggaacccccgaaaaaaggaagaatcgtcgctttttccggggatacgagggtatcagagcgggtaacggagctggcgcgcaatgcggatgtgcttgttcatgaagcaacatttgcaaaggaagatgcaaagctcgcacataattattatcacgcgacgacagaacaggctgcgcaaacggcaaaaaaagcaggcgccaaacggctgatcttaactcatatcagcgcaaggtatcagggtgaatcgccgatagagcgtctcgaacatgaggcgaaagcggtatttgaaaacagtaagatcgcatttgacttcatggaggtcactgtggagcggtcttaaaaaatggacgcttgacatttttttctgatgagatataataaaacgtaataattacgatttgtaggggtgaaaatgatgcgtgtgaatgttacattggcctgtacagagacaggggacagaaattatattacgacgaagaacaaacggacgaatccggaccggttagaaatgaaaaagtattcaccccggttgaaaaagtatacgttgcatcgtgagacaaaatagatcacgataacaaaagccattgtgccgttgcacaatggcttttgttttatcagtttaccgcctgataggcaggagcattcatttgctggcgcaccgcgcaccaaacatcataaatggcaaggtggacgatgtgcggttcatcgtggtgaatggcatgagaactgtttttggcctgaatccatccgctttgataagagacatcaagcatgcttctgtgcagtttcacccattgttcatgagcgtgctttaaacgctcatcccgctctcccgatgataaaatcaacagcggcatatcgccgaaatgaatctgctgatgcttgatctgcctaaggctcgtcaaaaattccgcgtgtgatccttccaatttgaactgtttcaaataggcggccttcatttcttcgggaagaagcggaagcactttcgtctcctgatcctcagaaaccggatcaagcagcaccatcccgagaatatcccggcggttccggctcgcccaaagtctgctgataatcgtgccgtatgaatgcgagacgacaaggtaaggaggcttgacgccggccttcagaagaagagcgtttaattcctgtaccatatggtccgccgttctcttgtttcggcttcgtccgcttttgccgattccggctctgtcatatgtgaaaaccccaaattcttcatctatgtcagcgagtaatgatgtccatgtttcagaagaagtgccgtagccggcttcaaagacgatcgtcacttcgccggcgcctttacggtgtttcgtataaaacggacacccgtcaatcagatatgtcctttccatccatgctgctttcattggagtcatctcctctaattggttctatagggaagacggagaagcttcggcaatcgtttctcgaaaaataaaaaaagagacagccggatcgaaaaactccggctgtctcttcatcaccatgctctgtcgtattgaaccggtgacggtatttcagtattcagctgcttcgctgcactccttgcaaagtgcggatcgcgcagaagttctcttgcgacaaaaataaggtcagcgcggttgttttgcagaatttcttccgccattgttcccgtcgttatcaaaccgacggcgcctgttgcgatttcggcctgttcacggattttctctgcgaagctcacttggtagcctgggaagacattaatatcagcttgaacgagtgcgcctgagctgcaatcaatgaggtcgactccctgttctttcatccacttcgcaaaaccgatatgatctgcaatgtccagccctttgtctgtataatccgatacagaaatacggacaaataacgggccgtcccagacttccttgacggcttcaatggtctcgcctaagaagcggtagcgattttcatgtgagcctccgtattcgtctgtacggtgattggacagaggggacaaaaattcgtgcattaagtagccgtgtgccgcatgaagttcaataatgtcaaagccggcttctttcgcgcgcgccgctgcctgtttgaattcctgaatggtttctttaatttgttctgtcgtcatttcagccggtgttttggactgctcatcgaacggaatggctgacggagcgtaaatgtctccctcaagctcagctttacgtccggcgtgcgcaagctgaatgccgattttagatccttgcgctttcacttgttccgtcagtttggcaaaaccttcgatatgatcatcgctccaaatgcccaaatcctgatcggaaatgcgcccttgaggattaacggctgtcgcttccacgataatcaggccgacctgtccgattgcacgcgatatgtagtgcgccatatgaaaaggctgcagttttccgtccttctcatgtgaggaatacatgcacatcggtgccataacaatacggtttttgatcgttacatctttaacggtccatggtgtgaataattttctggccatttatttcgcctcccggaatgtttttagacattgattataacaactcatgatcattcagtcatataaactgctcacaactgaacacatcgttcttattgttctggacgggcatttttttatacacagcgtggccgtatcttcataacaggcatttacagccgatcatatagcaaatatagatgagaaacgcaccgatgactgcgtggcctcctttgaaccagtttgtcaggatgaaaatacagctgatgaagatcaccgcgccgaaggcaccgaatattccgtttttttgagcggctctgaaatcgtcggcgctcatatttttcagctgcaagtgaatattcagtaacgtcataatcggcagcaatgtaataacgcctgataaaaataagtatttcgatttgcttaaatacgcggcggccaccataacggtgccgccgataaaaaattgaatgagaaaactcatgctgaaacgctcaccttctgtttgttatcaagtataatgatggaaacattgccattttatttttgattgatgtataagtaaactaaatataactaatgcattggataataaagaatgatatctgggagatgaagccggttggatttaaagaagcatttagcctttattaaaacggttgaaagcggcagcctgacccaagccgctgccatattgaattacacacagccgaacatcagccaaatgatcagtaaattagaggaagagtacggttttccgcttttgatcagacagcggcatggagtgaggcccaccgcaaatggcttgaaagtgttacatattatgaaggaaattcaaaaaaactatgaaaaactgtctcaaaccgttgataatattaatgggttagaaagaggggaagtccggctcggcactgttacgagcgtggcggtaaaatggctgccgaaaattttgagggaatttaatgagctgtatccttccattaaggtgcatttgtttgaaggaaattctactgaactggaagaatggctgaaagatgaccggattgatgcggcgatcgggacatcccacagcgagaagtggcatttttacccgttggccgaggatccgattgtagcggtgatgagcccgcagcatgaattggcgcaatgtgaaacggttccgttacatgtcatggagtccgtcaaatgtatcgtgccttatccggagacacattttgatgtgctgaaagtgctgaaggaagaaaagattacgccgcgggtcgcttatcaaatcagaggggatgaagcgattattgcaatggtgcggaacaatctggggatcagcatcttgccgcagcttttggtgaatgattgtgatgtgctcatcaaacggtttgaccggtatgtctccaggcagctcggcattttgacagctcatgcaaaggagacgcagacaccttctgtccagaaactgattcaatgcatacaagaatgggttgcggtccgtcaggcttctgtctgaagaagcctgatgaaccgtttaagccggttcagcatagtagaccagcataaaatatgtcaccggttcatccgaggaattaaaataactgtgcggcatcgcccgaagtcagcacatgcttttcgtcatcaagctcaaccgtcaattcaccgctcttgattaaaatgtatcttcccctaaatgtgattttgcctcatgggcgcagcccggcttcaggtcaactatgtcaaaaagtttgaccgtgacggtggtgagcggggttatttcggtgtcgggctttcgtttgtatataaaaagggcatcaacggcacatgctgttgatgctttttttgaaatgctagggtttggagagcacttcaattccgacgttgaccattttgtccagtcccataaaagacaggcagattttggcgcgtctttttcttttatcgatctttttaataatgccttccattcctttaagaggccctgaggcaacggttacttttgaattttcaatatagacttttgaataatctacagtgtctccttctccgatcagcctaatgatagggaggatttcttcatccttaattgtcgtgaaataggttttacgctctttggaataatatgcgccgttattcacgattctgcatgaaatggggagttctttgattttatgaaatgtccgctctgtcatcttcgttttaaacaacacatatcccggaaacatctttttgagtgcctcgtatttgattccggcttttcgttctgtgacttttttcttgggtatgattgagtagagagcctgctcatcaaactgcagacgcagaaatttttgaactgtttcttcttttccggactctacaaaaagtgcgtaccatttcatgactgggtcctccttagaataataagaaattattatacaaagaaagtatttaatggatagtatttaaagtgattaaaaatttttctaattcgtcttttttttacataatatatgaaaatgaaaaataagtatagacccaattgacagagaagcgatgaattttctttgacatgaatagggttcagggaattatctgacatttatcccgaaacaattatgccgactgtccacctaacataaaactgtggaataaatgtcagaaaataacgaaataaagccttgacattattatctataaattgatattattctctttaaatagcaactatttgttaaatttattaaattgatgtaaagcacctattaaatttcaatcgctgtttcggcacgttgaagaggaaatagggattataaaaatgattgtagtgtatatatctacatatacatgataagggagaagtgtgccgtcatggctgttttcgggcatattggcactgcagcttgtcatgcgaaacattcagtaaacaagcaagatgtctttatataaattatgttagaaaaggaaaacacaatgcgtttgcgatttctaaacctgtgctgaatcgcaaacgcgtttgtgtttttatttttatgccggtgtttacaccagtcaatatatgaaataagagacgtttttgtatggagatccacatgtgatgtacaaaattggcgatgcggaaaggatgaggataagatgcttacgtttgtgttcccggggcagggttctcaatttaaaggaatgggagccggactgtttgatgaatttcaagatctgacacgtcaggctgatgacatattaggctactctatagaagaattgtgtctggaggatccgaatcaccagctggggaaaacgcaatttacccagccggcgttatatacggtgagtgcactcagttatttaaagaaaatgaaagagtccggcagagagcctgattacgccgcagggcacagtttaggagaatataatgcgttatttgcggccggctgctttgattttgagaccggtttgcagcttgtgaaaaaaagaggggagctcatgagcaaggcagctcccggaggcatggcggcggttttggggtttaccgctgaacaagtaaaagaggttctatccgattatcatctgaccggcattgatatcgctaaccacaattcaccttcgcaaattgtgatcgccggaacgaaacaagacattgaaaaagcgggccccgtctttgaaaaagccggcgtgagaatgtaccttcctttaaatgtgagcggcgccttccattcccgctatatgaaagatgctgaaaaagagttcgcggattatttagaagaaacggcgtttttgcctcttcgttttccggtgatctcaaatcttcatgccgcaccttataagaatgatgaaatcaaaacaaatctgactttgcaaatgaccaatcaggtaaagtggacggacacgatacgccgtctgatgggacttgaaaataatgaaattgcagaagtcgggcccggggaagtgctgacaaaactgacgagtcagattaaaaaagatgccgtcccattacctatgccgaaagaagagtctgatactgctgatgttaaaggatcggcagctgatccgcaaaaaacggcgggaatgagattagggaacgaagattttaaaaaagattataacatccaatatgcttacatgacgggctccatgtacaggggaattgcttcggaacagatggtcattaaagcggcaaaagcgggaatgctgggctttttcggaacgggcggagtgagtatcgaacggatcggacaggccatcggcaccatccggtctgcactgcggcaaggggaaacattcggaatgaatcttcttcatcatatgatgtcacctgacaaggaagtcagaatgatagatttatatttgaaaaacggcattcatcttattgaagcatcggcatttatgggcataacccccgctcttgttatatacagggcaaagggattaagcaggaatcatgacgggtcggtgtcagttcaaaacaaaatcatcgcgaaagtatcccggcctgaagtcgctgaggcctttctgaatccggctccggctcatgtgctggaaagacttgtgtctgacaatcggctgacagccggggaagcggcgcttgcaaaagaaattccgatggctgatgacatttgcgttgaagcggattcaggagggcataccgaccaagggattccgtatacattaatgcctgccatgatcagactcagagaccgcatgatggagaagcacggttatacgaaaaaagtaagaatcggcgcagcgggcggcatcggcactccggaagcggctgctgccgcgtttctgctcggtgccgaatttatcggaaccggttctattaatcaatgcacggtcgaagccgggacaagtgattcagtgaaagatctgcttcaggaagcgaacgtgcaggatacgtcatacgctcccgcgggagatatgtttgaagcgggagcaagggtgcaggtgctgaaaaaaggcctgtttttcccggcaagagccaataaactctttgacttgtacagacaatacaattctttagatgaaatagatgaaaaaacgaaaacattaattgaagaaaagtatttccagcgcagttttgaagaagtgtatgagcagttgaaacgtgataaatctcctgagcagatcgccaaagccgaacagaatccgaaacacaaaatggcgatggtatttaaatggtatttttctcatacgacaaggctcgctctggaaggaaaaagcgaaagtaaaatagattaccaaattcattgcggccctgcgctcggcgcgtttaatcaatgggtgaaaggaaccccgcttgaaaattggagaaacaggcatgtcgatctgatcggcaaacagctcatggaagaaacagccggccttcttgcgcaaaggctggtatcgattacaggctgagtatgaccagacattacattttttctgcggaggacagaccatgctgattgaaaatcatgaattaacgatgagccatgtcgggttagggaatttgaatgagtacgcgctgctgctgttattcggcaacgcacacagtcaccatttaacggacggaacaggattccggcctgatcagatggccgatcaccaagggctgattttgtatccggcttattttatgacacatctcaaagttccttcagatcagcctcttgatcagtaccgattatgggacgaggtttccgtcggagtcgatatctcccggtttggagaaaccatattagaatctgattatttgttcgggccgaaaggagcggtcagctctgataaaagcgagtgggaccggggacggtttccttctatgaaagccaatagtttaattgtcgtcgacgtcacacaaacagaaggttcgacgcgcaaagtctcagcgcctaaggctgaatgcattgcggaactttctaagctagccaagccgccttacgcgctgatgcggtcaaagaaaatcagaacggacgccttcggtatgaagccgggcaatctcaaaacagcagaccccgtttcatatcgggttcctattgatcaggatgctgcgcccgggcatgccatggtgtttgcgaaattcagcaagataatggatgcggcggaatttgaatggatgacgcgccggtcgaagccgggttttccggtttcaatcgcgcggcatttatttttgcttgaaagagagacgtattattacggaaattgttttgcagatgaagagcttgatatttatatgacgggacacattgaagaatgcgatcccgactttcacggtgagtccctcggtatgatctcagtggcgaaaatcagctatcagattgaagtctatatgaaaagaaatcatacattgctggccatttccaaggtggacaagctgctggcggtgccgacctcttcacaagatcatattccggattataagcgggtcatcagaagtttataaaatgaagaatggagctgaaagcaaatggaacaaaccaaggaaatgaagcagatcatcgcacaaatcattcaggacattcaagaacagcagtcatatcgggccgtcgaagcgggggatgatgtgagagtcatagaggatctgggcttctcatcactggatatcgctcaattagtcgcacagatggagatggaaaccggagtagatcctttttcccaaggagaaacgatttccagcattacaaccgtcggcagcatttgtgatatttatcaaaaatatatggacagtgctcaatcatgaaaacagaaagcgggggagatatcagctgggtgactgataagcttagggaaacgcaagacagtgagtttctcatttttaaagggcagacttttacgtatgatgatttgctgacacgaatcagcttttttcagaaagaacttgaacaaaacggaatacgtgaaggagaatgtgtggcgcttatcggggattattccccgaacgccatttttttgctgatggcgcttttgttaaaccgaaatatcgttgtccctctcagcaatgaatcaagggaaaagcatctcgatatgtttgaagacgcgaaagtgaatcaaatcattgaaataaatgaaaatgacagctggacgcttcgtgcaggttctgaaagcgcctctcaccctctgcttgatgacctgcgcgagagaggggagtcaggcattattattttcacatcgggaacttccggcaaaagcaaagcatccgtgttaagcgccggccggctgcttgaaaaatataaaacggcgaagagaaaaccgctgcgtacgctcatttttctgaaattggatcatatcggcggcattaatacgctgtttgcgattctgtttaacggggggaccatcgtcacatcagacagcagaacgccggagtccgtttatcaggcggtcgacaagcatgctgtccaagtgctccccgccaccccgacctttttaaacatgctgctgatgtccaaggcggatgccggctataacctctcttcactccggctgatcacttacggcacagaaccgatgcccaaatcaacgctgcgcggcattcaccggctgtttccggatgtacggctgaaacaaacatatggattaactgaactgggtatattctcaacgaaatcaaaagacagccaatccacttggatgaaagtgggcggtgccggaacagagaccaaaattaccggaggcacgctttgggtccgttctgagtcggcgatgctcggctatttaaacgcaccgtcacctttcgatgaagacggctggtatgacaccggtgaccaggtggaaacagacggcgaatatataagaatccttggaagaaagagtgaaatcattaatgtgggcggagagaaagtgtttccggcagaggtggaaagcgtctttctggagataccgaatgtccgggatgttctcataacgggaagaaaaaatccgattacgggcgagattgtcgcagcagaggccgtgcttgaaaaagaggaagatatcaaatctttcagaaagcgggccgtagctcattgcaaacagaagctgcagccatatcagataccgcagatcatctctgttacagatcggaaactgtctaatgaccgatttaaaaaaataagaaacgtgtaaaacaggaggcaaatatgaataacggaaaagtagcggtcgtcagcggaggaagccgggggctcggaaaagcgattgtacatacgcttttggatgaggattacaaagtagccgctttcagccgcagtgaatctgattttattaacacattgagagagagtgaaaagtaccgcggccgcttttattgggaagcggcggatgcggcggatgatgccgccatgaaacagtttgttcttcaagtataccgcaagttttccagaatagacggcttggtcaataacgccggtttgaaccttgatcagctgctgcccctgaccaatgatgaagacattgaccgcatcctcaatctgaatatcggctcagtcatcaagctgacccgaaacgtatcccgtgtcatgctgaaacaaaattccggatcaatcgttaacataagctccattatcggctcaagaggatttaaaggcacttcagtttacagcgcatccaaagcggctcttgacggcttgacgcgaagcctggccagggagctcgggtctaaaggaatccgtgtcaattcacttgcgcccggttttgtggacaccgatatgacgaaaaatatgccggaaaaacaaaaatcgcagattatcagaaggacgccgatggggcgtttaggcgaaacagacgatatgaccggactcgttcgtttcctgctttctcctgaatcgtcctttatgaccggacagacaatggcaatagacggcggattaacttgttaaagcacagaaaaattcttttgtacaagggatggtatcctcatgaaatgtattaacgaatttttaagaacggtaatagcgcaaaagctgggtgccgaggtgaccgaagcggaagataaaaccgctttttttactcttggcgtgacgtctctcatcagtgaagaaatcatgaccatattgcataaagaatttaccggcctttctgaaacgctgctgtttgaatatccgaacattgagaaattgagtgagtttttaagtgcgcagaaacgaaatcccgaaagcgttcttgaattcaaagaaacggagcctgatacgggaagccggcaggaagaagaattgcttcccgtacaggcggctgaaaaggtgcctgtacaggaaacggacgggagctctgatattgcggttatcggaatgagcgggatgtttccgaaagcggaaaaccagcatgatttttgggacaatttaatggaaaataaagattgtgtctccgaaatcccagaggacagatgggacagctcttattactcggaagagaaaacggcagaatacgcgtcatacagtaaatggggaggttttattgatcatccggatcaatttgacccgctgtttttttctgtttccccgtgggaagctgatttaatggacccccagcaaaaattgtatgtcacgtgctgctgggaagcgatggaggatgccggttacgggaatccggcggcgaggccgacggatcaaatcggtgttttcgccggagtgacctggaatgaatattcattaattgcacacgaagaaggtttcctcaaagatcagtacaaaggccccggctccttatattggggcattccgaaccgggtttcttatttccttgatctccatggcccgagcattgctgttgatacggcgtgttcttcatcgcttgtcgccgtccatcaggcttgtcaggccattatgtcgggcgactgtgaaatggcgcttgccggaggcgtcaacctcagcttacatccgcaaaaatacatgtttttaagccaatcacattttctgtcttctgaaggaaaatgccgcagtttcggtgaaggcggagacggttacgtgcccggcgaaggcgcgggagccgttttgttaaaaccactgaaaaaagcgattgcggataaagaccacatctacggtgtcattaaggggtccgccactaatcacggcggcaaaacgaccgggtatacggtgccgaatccggaagcgcaccgggacctgattttatccgctctaaacagagccgcggtaagtccggcggatatcagctacattgaagctcacggaaccggcacggcactcggcgatccgattgagatacgcggcctgtctatggcatttgataaacagaccgatgagaaaaactactgcggaatcggctcggtgaaatccaatatcggacatttggaagcggctgcagggatcgccggtttaatcaaggtgcttttaagcatgaaacatgaaacgcttcccgccagtctgcactccgaggaactgaaccgcaagatttctttttctaattcgccattttatgtcgtccgaaacaaccggccgtggccggctgaaggagataaaccgagaatcgccgcaatcagttcattcggcgcaggaggctctaatgcccatctgatcgtaggtgcttatcagccaaaacggcaagcggacgggaatactgagcaaaaaccgcatgccgtcgtattaagcgcacattccgaacagcagctgaaagaatatgccgggaaattaagctcttttcttgcccgattggaaaacctgccttctgccggcggatacagtctggaaaatatcgctgccaccttattgtcaggcagagagcctttctccttccggcttgctgtcattgcatcatccctttctgagctgaaacagcgattggacggatttgtaagcggtcacagcgacggcaggtatatgtacttcggaaaagcgtcacccgggcggccggacgtttcaggccaatccgtttcagatcctgagaaatttgctgcgctgtgggtgaaaggccttcaaggttgcaaaaagccggaaacgccgtatcagaaagtcccgcttcctacgtatccgtttttaaaggaaacgtcctggctgaccgatcaaaaaaagcggtatacaaaaaagccccaaaatatcaaaaggcgtgaagcgctgcatcctctgcttgatgagaatatttcatccgcccggaaagggacgtttcaaaagatattttccaaggacgaatatttctttaaagatcatttagtgaacgaaaaatatgtgcttcccggagtctgtcatctggaaatggcggcatacggcgcgggattgtggggagaacgcccggtcgtctctcttcaaagtgtgtggtacatggatccgattgtgacagggacagacccaagatccgtcatgatagagtttgaagcagaaaaagagcgtataagctatgtcattaaagaaaaaggagcggacggcgctctcttttcgcaaggagaagtgatttgtaaagaaaaaggagcgtcttttgaggccccggcctttcagctcccggcgccatttgcgcagagaacggagccagaagacatctatcactcgttctctgaggcgggaatcgtgcaaaaggacagttttcaggtcatccgcgaattctcttatacagaaaggaaagcactggccaaattaacgctcccgtcacacttggaagccgattttaaacagtacatcctacatccgtccttaatggatggcgctgttcaaactgcaatggcgcatgtgctgcaatttcaaaaagagcctgtgcttatcgtaccgttttccttcggagaaatacagctgcttgaaccgttagcgaaaaccgtatttgtgcatgcggaggtaaaagcggcctctgttcaccaatttgatctgcatatttgtgatgagcgcggcgtgctgttggcggcagtgaaagattttatcataaaagaggtgcaggaaagcgccgggtttaaccaaaaagccggcgtcacgccgaagaaaagctgtgaaacggaattgcttatgacaccggtttggaacaccgtcaccattccggaaaccggcatgtctttcatgcgtgaagaaaaaataatcgtcatcggggccgggccggattttcagcaggctttgaaagagatgtattccgatgtccgttttccggacatcacttctttggacagcgcggaacaaatggctgaaacattgaaagcgcaaggctcttttcaacacatgatatgggcggcgccggatcatcccattccatccgtttatgatgcggatacggccgagggacaggagcacggggtcatgcagcttttccggctggtaaaagcgcttctgcttctgaattttgacacggaacaactatcattgacaatctgcacgtttcaagcacagccgattcatgaacatgatgaggtcaatccgagtcatgcaagcatacacggattagcggggtcgctcgcaaaagaatacagcaattggaacatccggcttcttgatttggaatctcaaaggggagaccggcatcttcccgatgtcttctctttaccgtcggaccccgagggaaatccgtgggtctttcgtgcaggtcagtggcaccgacagcaattggccgtctgccggcctcatgcagatgagccttcattataccggcacggcggggtttatgtgattatcggcggagcaggcggaataggagaagtatggactgaatatatgattcagacctatcaggcgaaaattatctggatcgggagacggaaaaaagatacacagattgaaagaaagctgaaaagacttgcggctttaggtcccgcaccgcaatatttcagcgcagatgctgcggattatgactctctcaaacgggcgtatgacaccattgtaaaggaaaatggaaaggtccgcggaatcatccattccgccatcgtgttatcagaccgaagttttgccaatatggaagaggatcagttccgcgcgtcactttctgcaaaaactgatgtgagcttgcagattgcccgggtagctgaagctgaaggggaacccctggatttcttgctgtttttctcttcgatgatgtcgtttcaaaaagcgccgggacagagcaattatgccgccgggtgcacgtttaaagacgcttttgctaagcggatctcacagaaagcgccgtatgccgtaaaagttgtcaattggggcttttggggaagtgtcggcgttgtcgcttcagaacaataccggaaacggatggagcgggacggaatcgcttctattgaggcgcccgaagcgatgaaaacgctggaaaccctgctttccggacctcatgaccagctggcgctgatcaaaacgacagatccggtttttatgaaagacgatctgaaagaacaagtaacggtttatccggaaaagattccctccgcactcggacaattaacggttaacatcacgcagaatgacgaagctgagcggttaaaagcatcaagtgtcatgagctgcatgagagagatggagtcccttattgaaaaaatgcttgtatcaaccctttatgagatgggagccgggcttggtcaggctttgccgttatttcaatcggctgccggcataacggaacaatacagcagatggctgaaagagagctttgtcctcctgaataaattagcgcttactccggaaaaaacggatctagggcaggtgtgggaggaatgggagcggaaaaaagagacttggctgcgccagaaagacatgagggcgcatgtcagattggcagaagagacattgcgtgtgcttccagacattttaaccggaaagcttccggcaacggaagtgatgttccctgactcctccttccgtcttgtggaaggcatttaccgcaataatatcatttctgattttttcaatgacaagcttgctgacacattgattgcagttttgaaggaacgtctggaaaaagacctgcaggcgaaaatccgcattttagaaatcggagccggaacgggcgggacgagcgccgcggtcatgagaaaattgaaaccgtatgaagcgcatattgccgaatattgtttcacggatatttctaaagcatttcttttacatgcagaagacatattcggtccggaatatccttatgtcacttataaaatattcaacgctgagcagccggtatcaacagaagcgccggacatcggcacgtatgacgcagtgatcgcgaccaatgtgcttcatgcgacaaaaaatatccgctctacgctgcgccatgcgaaagcaatgctgcaaaaaaacggccagctgttaataaatgagatcaacagccgcaccatattcaaccatgtgacgttcggccttcttgaaggctggtggctgtatgaggatcatgatttacggattccgggctgtccgggggttgatccggccggctgggcggaagcgctttcgcttgaaggattcgtccatcctctgtttccggctgaaaccgcacacgacttaggccagcagattatagcggctgaaagtgacggaacggtcaggcttgccctcacgcaggcgtcagaagagaagccggagcgccgtccgtatgacgcagaaggtctttcggatgatactttgcacttcagcctgagagaaaaaagcgttgaactgatgaagaaggtaatcggtgaagcgcttaaagtgccggcgcatcgtcttttatcccatgaacctttaaccgcatacggattggattccatactggtcgtcagactgaccaacgcgttaaaagacgtcttcggttctgtcagcagcactttattttttgaatatcaaaccattgatgagcttgctgattactttctgtcttcccgtaaagaagcgctcgagcggcaattcgggaatggacgggctcatcccgaaaacgccggacgggtgcaggctcccgcagaaagcgccgcgccgattccaaacgtaagggaacggggcatcacatatctgacggaattaataggaaaaacgctgaagattccgagcgggagaatggatccgtcggtttccttaaccgcatacggtttggattctattctggtcgtcaggctcacaaatgcctttcgtaacgtgtttgaccaaatgaccagcaccctcttttttgaatatcagacgatagaagaaatcgcggattacctgcttctttctcagccggaagcatttatgaaagcgatgggtgtgcgtaaggcacagctgtctgatcacacagataatctgaatgtaaaacaaaacaagattcctcaaaacgaggaaggcagcaggacgaacggagatccctatatccaggatatcgctgtcatcggtctgtcaggccggtatccgggcgccgatcacgttgatgagctgtgggaaaatgtaaaagccggcaggcattctattactgaagtgccgaaagatcgctgggactggaaaacgttttataacgaggaacgcggaaaatgggggtccatttattcaaaatggggcggttttctcgatgacattgataaatttgatccgctgtttttccgtatatctcccgcggaagctgaaaggatggatccgcaggaaaggttgtttctgcagactgcttattcaagcattgaagatgcggggtacaccccggccacgctttgtgacagccggaaaatcggagtctttgtcggtgtgatgaacagcaattacccgacagttcccagcgactggtctatcgcaaacagagtatcgtttttgttcaatttccaagggccgagtatggctgtggatacagcctgctcttcttctttaacagctgtccatctcgccgcagaaagcctgcggagcggaatgagtgaaacagcgattgccggcggagtcaatcttatcgttgatccggcccactatgagcggctgtccgctttttcaatgctgtctcccggtgataaatgcaaatctttcggagacagtgcggacggttttgttgacggtgaaggagtaggggcgattgtgttaaagccgcttgctcaagcggagaaagacggcgatcatatttacggcgttatcaaaggaagcatgctgaacgcagcaggcaggacaaacgcttatatggtgccaaatccgaaagcgcagtttgatctgatcgcagagacgttgaaacggacagacattcacccgagaacggtcagttacttggaagcccacggaacgggcactgcgctcggtgatccgattgaaatcgacgggttaacgaaagcttttcgcctgacaacagaagaccggcagttttgttccatcggttccattaaatcaaatatcggacatttagaaagcgctgccgggattgcggggatcaccaaactgcttctgcaattgaaacataagaggattgccccttcattgcatgcggcggaattgaatccgaatattgagtttgagcacactccgtttttcgtacagcaaaaagaaacggaatggaaacgacctgtcttgaatatcacgggtaaaatgaaggaatatccgagaattgccggcatttcctcgtttggagcaggaggttcaaacgcacatgtcatcattcaggaatatgtgccgtctgacagcctgaaaccaatggaaaacgcgtctgtttctccgcaaaaaccggctgttatcattttatcagcgcgaaatgagcagcaattatcagagcgcgcccgccagcttctggatgatgtcataagaaaaaaacgttctgacggggatttggccaagatcgcttacacgcttcaggcgggaagagaaccgatggctgagcggcttgcatttacggccgagtcgatagaagaactgaaaatgaagcttatgagtttctcaaacgatcataatatcgaacatgctcatatctggcggggcaggacagccaaacatcattcattggcggcttcgctcacttctgatgaagatatggcgcttaccataaatgcctggctgagaaaagggaaatacggaaagctgcttgacctttgggttaaaggacttgacgtcgattggtcagctctttatcagtgcaacccgggccgcatcagtctcccggcctacccttttgccaaagaccgatattgggtcacaaaagctgatgtgtcacttgacaaaacaggctcagcgaaaagtgagaaagcagccagacttcacccgctgctccacgcgaatacatcgacctttaccgcccagcgttttacttctgttttttcaggacatgaaccgttttttgccgatcacatcgtcaatggaaaaccggtgcttccgggcgcggctgctttagaaatggcccgggccgccgttacatttgccgccgaagacttgccgggcgggaaaacgggtgtaaggctcaaacagatcgtttggctccgtccggtgacggcgctttctgaaggagtgacgcttcatgtaaagcttcagccggaagaaaacggagacatcgcttttgaagcgtatgccgaaggagaagagccgcttgtctttttccagggaaaggccgtgctcgaagagacggagcgtgctcctgttctcgatgtagaagcggttcaggcgcgctgcggcggccgtcacttgtcaaaggctgagtgctatgaagcgttcgacagcctcggcatcacctacggaccgtctcatcaggcgcttgacgccgtctatgccggaagcggagaagtgctcgcaaagctcactcttccgccgtccgcccgcgaagaaaaggagccgttcatcctgcatccgagcatgctggacgccgcccttcaggcttctatcggtctcgtgctctcagacggttccgcgtccggacggccgtttctgccgtttgccctccaggatatgcaggtgttttctgcgtgccgggagacgatgtgggcggtgctttcctcagcggacggcgcctatcatattgagctgtgtgatgaaaacggtgcggtatgtgtccgattgacggggctcaccgcccgttttctggaagaggaaacggaggaaaaaccgctcttgcttcagccaaagtggcaggaatcaccgccggatgaaggcagcggacaagaagagtctttcagatacgtgacactgtatggcggaatgaacgctgaggacataagcggcgccgtatgtgcggctgacggcgaaggtccgattgaagaccgttatgacgcctgcgcggcggagctgtcagcgatcgtcacgcgtcttatcaaagaaaaacagaagaaaaaaacgctgatccagcttcttgtccccgacaggggggaagacaatgtattggcggggctggccgcttttctgaaaacggctcaccttgaacatccgaagctgtacggccaagtcatccaagccgatccggacgagtcagcctcatcgcttcttgccaagctgaaagaaaaccgggcgcatcctgaacaagcggaaatccgttatgaagacggcaaacgtctcgtcagaaactggcgtcatctgccggcgcctcaaagcggcgccgttccgtggaaagacgaaggggtctacctccttaccgggggagcgggcggcatcggcctgattgtcgctgaagaaatagccttccgcgtcaaaaacgccgttctcgtattaacgggaagggcggaagcgcttgataaagaccgctccgcccgcttacggcgcttggaagcgtcgggtgcccgcgtattgtatcaaccggttgacgtgacagacagggcggcggtcatcaccctcgtccgcggcatacaggaggagcacggaacactcgacgggatcattcacggcgccggcgtgatcgctgacaattacattctgaaccagacagaaaacgaacggaagaccgtcatggcgccgaaggtgaaagggcttatcaatcttgatgaagcagcgaaagatgtgcggctggactttttcattctgttttcttccttggcgggaggtatgggaaatccggggcaggccggttatgcggcagccaacgcatttatggatgtttatgcagcccgccggaaccgtctcgtgcgggacaacaggcggagcgggcagactctgtctgtcaactggccgctttgggaagaaggcggtatgcgtgtggacaaagagaccgaacggctgatgtacgaacagaccggaatgaaagccatgcgatcggcctcaggcatccaagcgctttacgccgcttttgcctccggagaacaccaggtcatggtggcagaaggcgacgaaaaacggatccgcagccatattttcgatctgggcgaagaacaaagcgccgccggacaagctccggcagtggcagatgcaagagatctgaaagatcaggttcaagagaaactaaagcggcatgtatcagatcttttaaaggtaagcatgaaagatattgaggctgacagcgaactgacggaatacggatttgattcgatcatcttcactgaatttaccaatctattaaatcggtcttatcagcttgagctcagcccgactatcttctttgaatttccgacattgcgcaaactgagcggccatttgatatctgaatggaaagaagcattcagcggcttagaaggagagcgtttaaaaaccgctccaaaagccggaataagaaaagctgaagctccggcggccgttcatgtcaagcgggaaacgcccgtatccgtaaaaggaagatcagaagaaaaaaccgaaccgatagccattatcggaatcagcggtatttttccgcaggcgaaagacatagatgaattctggacacgtttacaaaaaggagagcattgcatcacagaaattccacgagatcgctgggattggcgcgaatattacggcgatccggcagcggatgcaaataaaacgtcaattaaatggggcggttttatagatggagtcgccgggtttgacccgctgtttttcgggatatctccgaaagaagctgaaatgatggatcctcagcagcgtctattaatgatgtatgtgtggaaagccattgaagacgcggggtactcagcaaaacggattgccggaacaaaaaccggcattttcaccggcacactgggaagcggatatcaaactttaatcaataaggcgggtcttcctgtcgaggggtatacgatgaccggaatcgtgccgtccgtcgggccgaaccggatgagttattttcttgatatccacgggccgagcgagccggtagaaaccgcttgttcaagctctttagtcgccattcaccgcgcggtaaaagccattgaaacgggagattgtgatatggcggtcgcagggggcgtcaacacgatcgtcacgcctgaagggcatatcggttttcaaaaagcaggcatgctcagtgaagacgggcgctgcaaaacattttccgatcaggctgacggttatgtcagaggagagggtgccggcatgattgtcttgaaaaagctttcagaggctgagcgtgacagggatcacatctacggcctcatccgcggtacagcggaaaatcacggcggacgctcagcgtcacttaccgcgccgaatccgcaggctcagacggatgtgctgaaaagcgcttatcaaaaagccggtattcacccgtcaaccatcacttatatagaagcgcacggaaccggaacggcactcggagatccgattgagatcaatgcattgaaaaaagctttccaaacagacggggcgccgggcggatattgcgggataggctcagtgaagacaaatatcggacatttggagctcgcagcaggtattgcgggcgttatcaaagtattgatgcagctgaaacatcggacgctcgccaaaagtctgcattgcgagaacatcaatccccatatcaaattgaaggacagcccgttttacattgtgacagaaacaaaggagtgggaagcgctgcgtgatgaaaacggccgggtcctgccccgccgggcgggtgtaagctcattcggtttcggaggtgtcaatgcgcatatcgttattgaagaatacatgggcagaagtgagacggaacagcaggaaacccgtgagaaagcgtcatctctttttgttttgtcggctaaaaataaagagcggctgaaagaaagagcgcgtctccttcgcgattttatccaaaacggatcatcccgcgatatcgatcttgcagatgccgcatacacactgcagaccggacgggaagcgatggaagcgaggctgggaatcattgcaggctccgcagaggaactgactgaaaaactgaacgcgtttctgttgggaaaaaacagcgaagatatcatcagcggccgtaaaaaacgcgagaataacacgatctccatgttctcagacgataaagacgctgctgacctcgtcagcgcctggcttgagaaaaagaaatacaggaaagtgctgcggctctgggcaaacggatttgacacggattgggagcagctgtatacggacaggaagccgcgccgcatcagccttccctcctatccgttcagagccgaccgctattgggtgccgaaacgggagcagctgccgctttcgaatcaaaaaacagtattattgcagaaaacatgggaaccgtgcgaggcagtgtcttcatccgagccgttcaacaacaaaatagcgctcatcgtctctgaagatacaaaagaccttgccgccgaggtgaaaaaacagctgaatgatgctgacattgtgcaggaaaatcagctcatctctttcttacagggtccgaacgcggccatctattccgggtttattgacttcaccggctgcggctcccgacaaaagcggcaggacatcagctgggtggcatcgctgcagcagctgattgaatacggccgcggactagaaaacatgaaaatgctttaccttacaaaagggcttgaagccttcaaaaataaggctgccgttatgcacggtattgaaaaagcggggctttatcgcatgctgcggcatgaatacagccaaattctcacctgtcacgccgatattgatcctgaagagccgctggagcagacagccgcttttattaaacaagaaattgaatcagacttaacggagtctgctgtttgctatagggacggcatgcgcttcagctatgttcttcggcagactgatcagattgaaccagaagccgtgcaaacagaccggactgcgtttccaaatgacgccgtcctgatgataaccggaggaacgcgcggactcggcgctttatgcgccaagcatttcgtttccgcatacggtgtgaagaaactgcttctgacaggcagaaaggagctgccgccgaaaaccgagtgggatcttgagcaaacagaccctgtcgtttcggaaaaaatacagcttatccggcagctggaatcacaaggcgtaaaagtgtgcgtctcagcagttgatctgacggataagcaggccgtcggacggcttataaaagaggtaacctcaacgctcggacctgtcggaggcattctgcattgcgcgggaattgcggaccgtgaaaaccctgcttttctccgtaaatccaaagacagtattgcgcgggtgctcgcgccgaaagcagacggccttcacagtctgtatgagagtgtaaaggatgatacgccggcatttttcgttctgttttcatctgtctcggcatccgtcccgattcttgcggcgggtcagagcgattatgcgatggctaattcttatatggactattttgcagaaaacaatgagagcggcatcattagcatacaatggccggcatgggatgagacgggcatgagcagggatataaaaagcgggatttatgagcaaacgggattgctgcggcactctgacgctgaaggtctcaagatgcttgattacattttaagagaaagacccggagctgtcgtgctgccggcacaagtgaaacatgattgggacgccaaagcgctggaaaatgccaagccagccgcccataaaggaatgagaacagcttccaaacctcctgaaacaaaaaaacgggaacataaccggattgatattcaatcttggctgaggtcgcttttggcaaaagagctgagtatcgatgaaacgcatatggatatcgatgtgccttttcaggaatacggaatggattctatctttctggcgcaagtgctgacaaagatcgatcaaaaactgccgtccgtttcaattgatccgactgtccttctggaacaccctaccatagaacagctcgcggattatttagccgtacattgtccggaagctttttcggcagatgcaacagttcccgcggagaaggtccctttgcagaagacgccgaaacggagcaaaaaaacggcagataaccccgggaaacggggaaaggttgcgatcatcggcatggcctgtcattttccgaaagcgggggatataaaagaattttggaagaatctccgcagcggaacggatgccgtcactgaagttccgccggacagatggaacgccggggaacactatcagccgggtgaatatcaagaaggaaaaagcatcagtaaatggggcggttttattcacgatattgatcaatttgacccggagtatttcaatatttcagaaacgctggcaccgatgatagatccgctgcaaaggcagtggctcgaagtgagcgcggaagctttggccgatgccggttatcaaaaagaggatctctggggccgccgtatcggcgtttttgccggtgcaagggcaggtgcgtttcatcagaaatttcaatatttgcaaaaagacgcgattattggcgcggggcaaaattttattaccgcacacatggcgcacatttataactttacagggcctaacctggtcgtggatacggcctgctccagttcgcttacggcaattcatttggccgtgcaggctattcaaaatggagaagcggaagcagcctttgcgggcggggttgacattttgcttgatgaaaaaccttttctcacaatgagcgcggcgagaatcttatcgccaaatggccgttcaaaatctttcgatgccgatgcggacggaacaggaatcggagagggctgcggagtgctgatgctgaagccgcttgaaaaagcgatagaagacgaagataaaatatacggcgttattgacggctctgcgataaataatgacggcagcacaatgggcgtgacgacgccgaatccccgggcgcagcaggacttgattgagcaggcggttcaatcagcggaaatcgagccggacaccatgacatacgtagagacgcacggaaccggtacattgatcggcgacccgattgaattaaagggattaaccaatgtcttgtctgcttattccgatgaaaaacaattttgcggtgtaggaagcgtcaaaagcaatatcggccacttgctgagtgcggcgggcgcggcgggaatcatcaaagttttgctggcgattgccaatgaagagctgccgccgactttgcattgccataaaccgaacccccgctttcaatttaaagattctccgctttatcctgtgcttgagctgaagcggtggaacggaaaaaaagagatactcagggccggggtcagcgcgttcggtttgggcgggaataacgcccatatcattgtcagcaacgaaggaattccgaaagagcgaaaagcggccatggaaccgaaaggcggccagacagtataccgaaaacaacggtattggcctgaaaaagcacagttgtccgaagcggaagaaaatgaggcgggcacagaagcaatgtttgaaataagcgaggtgtgatagattggcagttgccaccgatcaagtcaaaacgttcctgcagaaaatcagccatacgaattatatcgtccgggatcatcgcgttcatcaaatccgcgtcctcccgggcgtgactttaatagatatgctgtatcggctcgccgccgggtatctcggtgaacggcctatagaattaagacagattatttttaagcagcctgttgtaacatctgaagagtttgataaacacctgtatgtcacctttacgccggcgcgtgacagctggaaagttgagatcactagcgaaaaagcaaaaaacggcacaccgcttggcggaaaccgggatgagaatatggaatgccagctttatttgcaagaagacacgccccgggcaaaagaactgaatatagaagcgttcatgaaaaacgcaagccgaaaatgggacatgcatgacatttacggaattgcaagaagaagccatattgagcatggcgagtttatgaaaaatgaaggggccgtttatcagcttcaggataaagaagaattaatggagctcactctgagtgatttggctgaaggattccgggagaaatttaaggcgcatccggcttttttagatgcgtccacccttgccggctcttcttttgcattgtcggcccaaaagcagaatgacacaccttatattccttttatgatcaatcgtttttgcatgtatcagccgtttccgaaaacgatttacacttattctgcgaaaaacagccgcactgaaagcggcgtatcagatagcgaacctgatgtttattcggccgacttcacgatttacgacagggcagggaacgtattggccgaatgtgagaaactgacagtaaaaagggtcagacaagcgaatatgattacccatttgatagacaaagagaagccgcctcagcagaacagaagcggccgtggtgagtcggaaaattctgtggccgcagaagacgtgtctgaacagcaaacgccggaacaaaacatggtgacttacataaagtcggaaatcgccaggttgatcaatcgtccggcacaggatattgatgtgcggaaaggcttttatgatatggggcttgactcggcgcatttgctgaagcttgtaaagatattagagcagacttttcagcagcagttttatccgacactgctttttgaatattcatctgtccgccgccttgcgaattaccttatcaatgaagcgggctgtgtgctgaaaggttcggccgaagaacggcatacatcagacgctgacattgatgatgaggttctgttttttgaacccgcctggaaagatcatccgctggaaacggcggtgcagaacgggcaaaaacacacccgtcatctcattatcgctgccgatgcagggccccgtctcaccggtgaactcggcacacattgcccggaagcggaagtgatagaactgaaaaaggagcatgaggttgcagatgagcagtttggagcagatgctgagcgcatatttcgtatgctcaaacgggaactgacagaccatccgaaagaacatacattgattcagcttgtatgcgccgttgagaatggagcggcattgtcttccgctctcggggctatgctgaaaacggcacatctggaaaatccggctcttcgcactcaggtgatcaccttctgtgacaagaatgagagattgccaagtgatacggcggcaatgataagaacagaagcagactgctctcatgcaggctgcacagatattcggtataaagacaatatgcggcagatcagattgttcgaacgtattgagaaactggacgggcagacacagtctccttggaaacaaaacggcgtatatgtcattacaggaggtctcggcggtcttggatttctgcttgcccgtcaccttgcagaaaaagaaaaggtgaagctcgcactcatcggccgttcgccggaacagtctgagaagatcagcggactgaaagcattgggcgcagaagttctttacgttcaagcggacatcggcagcaaagccgaaacagagcgggcatttgctcagattacagaaacttttggccggctgacgggcatttttcattgcgccggtgttttaaaagatcaatttatcatccaaaaagacagttctgacttgaagcgggtgttcctgccgaaaatcagcggcctgattcatgcggacgaagcttcacggaatgaaccgcttgaatttttcgccgttttttcctcattctcggcgttggccggaaatgccggccagacagattatgccgcagcgaacgcttttatggatgaatatatgaaatatcgcgattgcaaagcggaaaaaggcgaacggaccggggcttctataacaatcaactggccgctttgggaagatggcggcatgcaggttgacagcttgatgaaagagatcatgaatgatgcaactggcaccagcccgcttccggccggggaagggatggcttcacttgaatatatgctgcgactcggcaagctgcaatctgttattttatacgggaaggagcccgctgtaactgaaagcatggcccgattggttccgatggcagacaagaaccgctcttcattatcccatgcagctgtcaagagaaggagccgaaaacaagagagacatacagaagagcacgatattgcggtaatcggattggcgggaagatacccgcaggcgggaagcatcgaagaattttaccaaaatctgcgctcagggaaagactgcatcacaacaatgccgaaagacagatggaaaggttatcctttctcatatgaagcagatcagttctaccgttacggaggatttttagatcgcatagacagctttgatccgctgtttttcaatctgactccgcgccaggctgaaatgatggacccgcaggcgcggctgtttttagagacggcttgggaagcttgtgaagatgccggtttttatcaagacagaacggcgcgcgggccatcttcacaaaaaagaaaacgcgtcggggtattcgcaggtgtgttttggagccattatgagctgttcggcgctgaaatcacacagcggggcacaccgctgtctatgggcgtgacgcctgcctctgttccgaatatcgtgtctcactgcctgaactttacagggccgtcaatggctgttgatacgatgtgctcttcttcgctcacatccatacatttggcatgtgaaagcattaaaaggggggagtgcgaattcgcccttgccggcggtgtgaatgcggtcacacacccgcataaatatgcgtttttggcgaatgccggatttctgtcttcagaaggcgtctgcaaaagcttcgccgacggcggtgacggttatgtgccgggagaaggcgtcggcgcggtgttactgacaaccgttcaagaagcggaaagaatgggctgtccgatatatggcgtcataaaaggctccgctttaaaccatgtcggaaaaacatccggtttgaccgtgcctgatccggcatcacaggcggaagtcattacagattcctttcagagtgccggcattgatccggagacattgagttatattgaagctcacggaacgggtacgtctctgggtgatccgattgaaattgaagggctgagccgcgctttccgcaaatggacaaacaagaagcggttttgcgccatcggctctgccaaatcaaatatcggccatttagaaggagcagccgggatcgccggattaacaaaggtgcttttgcagctgaagcatggagaaatctttccgtcattgcacgcggacacgctgaatccccatattccgtttccggacacgccgttttatgtggcggaccggctggaagaatgggaacggccgtcacatcctgaccagccgagaagagcgggtttaagttcttttggcgccagcgggagcaatgcccattttgtcatagaagaatatctgccgccgcaggctgaaaagaaatcggtaaatatacgggaagacgagccggttctgtttctgctttcggcaaaaaatgaagaacgcctattagaatatgtcaaacggtatgaccgctttttacgggaaaaagaagtcaaccttaaagacctggcctacacgcttcaagctggcagagaagcgatgcctgaacggctggcatttatcgttacatccgtttgcggcctgcaagcgaaactgaaggatgtgcttgaacggaaaacagaaattgaaggatgtttccgcggacgtgctcaagatgatatttcatcagcaggaatggccgagctgttgaaaaacaagcaatattccagattgctcactgagtgggcaaaaggagccgccgttgactggagcctgttatacgaaggagagaaggcgaaacgggtcagccttcctgtatatccgttcgcgaaggagcgatattgggtgcctgtgcctgcggatatccggaaacagacagacgaaccggcggaaaaccaaaagatcattcttcaaaaagactggaagcagcaagatccggcggagtctgaagcattatcaggaacagtaatgatacttgcaactgataagacgagccgattggccgatgctctttttaaaggaaacggtcatattgaaacgatctgcttcatccatcaggcaaaagacggcgccgattattacgccgccgcatcggggcgaaacctttacggccgagtgcgggagtctcttcaaaacaaacagatactcggggtcgtcgacataaccgcatatgatacggaatatgaacggcaggaagagatagaacacggaaagcttgcctttttacagcaggctctggaatcactccgtcatagcggcgctgtgttcagccaagtgacacaccgcctccagcctttcaaggaaagtaaacctctgatgcaaggggcgaaaacggcggggctgtaccggatgctgggcgctgagtatgccaacattcattcttttacgatagatagcgattgtgcaattgagcatacagaagaattaagcaggcagattgagactgaatttttacagccgcgggccaaaagcgtcagtgaatgctgctacaggctgaatcgccgttatgtgccgtttctgaagcagagtatgaatgtttcggcggcgcctgagctttcctattcgtctgatgacgtgctgttaataacgggcggatcgcgcgggatcggcgcaattgcggcggagcatgccgtttcacgcggctgcaggaaactggtcatcatggggcgggagctgcttcccgattcctcagagtgggcagacatgaaaaaggacggcattctcccggaaaaagccgagcggatgcagaagttagccgagcggggtgcggagatccgttattacagcgtttctcttacggatcaaaaggggctccgggaaatgacggacggcatccgctgcacgatgggaccgattaccggcgtttttcattgcgcgggcgcaatgggagaacaccccgctttttataacaaaaccgaaactgaaatagaaagcgtttgcacaccgaaagtaacagggcttcgcggtctctttgaagctgttcagaatgagccgctgtcgttttttattttgttctcatccgtttcgggcctgatcccttcgcttgctgcggggcaaagtgactacgcgatggctaattcatttatggactcttttgcaaatcatcaagcaggtaaaggaaacgtgtttgttaaagccgttcaatggcccgtctggaaagaaaccggcatggctgaaggcctgccggaaacacctgcttatcaaaaatcaggactttccaggctgtctgccgaagacggactgaagtttttagattacatcattttaaacggacaaagctgcggaattccttgtgttcccgaagacagtgaggctgattttggtgatcttctgaaggtgaagaaatctgaagctcccatgaaaaaaagtactgccggtgaccaaaaggtgaaggatatgattcgtcaatgggtgcgcaccgttttcagcgaagaactgaaaatgacggatgagcagataaaagatgatatgccgtttgatgaatacgggattgactcaatactctttgcggaattggttcaatcattgcaaaaacggatcagcataaagttaacaccgtccttaatgcttcaatatcaaacgattacagaaatggttgactatttcgcagtgcatcatgaagccgattttgtgacaaaagaaaatggtttcgttcaagacagggacgtagagcctgatttaatcgctgacgctgaagagagaacattcatggagccgaaagcggatactgaagacgatattgccgtcgtcggcatgtcctgccgttttccgggggcgggcggaacggatgctttttgggagctgctgatgaaaggaaacaccgccatccggcctgtccccgcaacgcgctggcatgcaacagcaaatgcaaaggattatgcggggtggattgatgatatcgacatgtttgatgcgggctttttcggcatctctgaaaaagacgcggcaattatggacccgcaggcgcggatcatattagaagaagcggttcattctgtttatgatgccgggtacggccaaaaggatttatcgggccggaaagtcggcgtgtacatcggcggcagggcgcagccttcagccggtatggaacatatcctgcaggcgcctaacccgattttgggggcgggacaaaactatttggcggccaacatttcacgatttttgaatgtcacagggccgagccttgtcgtggatacagcatgttcctcagggctgatcgggctgtcctttgcaaaagacgcccttttggccggaaggattgacgcggccttagtcggttcggtgagtctgctcttatctccgtccgcgcaccggttattcggagcgcgccatattttaaatgagaacggcgtgtttcatatattcgaccgtgaatcagcgggagaagtgctcggagaaggagcgggggcggtttttatcaaacgattgagcgatgcggtgcgggacggagaccgtatttacggcgtcataaaagccgtctcggtaaacaatgacggccggacgctcggtcccggttcaccgaatataagagcgcagagagacgccattcaaactgcgcttgacatggcggaaaagtcgcccgaagacattggatatatagaagtgaacggaggcggttccccaatcgttgattcggtggaaatcaaggcactctcagatgtctatcagctgaaccggaaaacgcttctgccctgccggatcggatcggtgaaaccgaatgtagggcatttgcttctgtcttcaggtcttgcgggcttcatccgttgtgtgctgagcgtctatcacaagcggattccgcctttcttatcagcgcgtgagccatttgaacattatgactttgaagcgtcgcgtattcattttaatcgtgaacccgttgattggcattcagagaagaaaccccgcgtcgcagctcagagttcatttcctgacggcgggacaaatgctcatatcctcgttgaagaatacagaggtgaaaggcagcgggaacatcacctggcgcctcagccgccggaattcagaaaaaaacactacccgcttttgggcggctggaacagcacggagaatgaagcggaaaaaacaagtaatgaaaaaacagacattgcggatcttttaaagaaatatgagaaaaaagcagagacaagcactgcacctgcagactcgttttggcaggtgacaacgtgacgtttttaaaaggggactaaccatgaaaaaaacagtgaatctgcgcctgacggcagaacatcccattatgaaacaccatcttgttcacggagaatctgtcatgcccggtctggcctatattgatatgctgtatcagctggcaaagcaaagccttgatctttcattccgttccatctgtctgaaacgggtgaccatttatcatcctttatcagtgaaacggtcagagcggcttgatgtgagtgtcatattcagtaaagaaaaggagttctggactgcctcgatttgcggggcgggttccgggacggttttcttatcagcggaggtgcatgaaggggttttctcatcagataagcgccttgacgcggaagagaaaaaacaagttgcgcttccatcagtctccatgcatacggtttacgaagacgcgagaagccgcggactgtcgcatgacgggctgatgaagccggagggagagatctatgcaaatgaagaggattgtttccttgatattcggcagtctgattcatgccaggaaaatctccccggcgctctctttcatcccgcgctgatggacggtgccgccatggcctccggcgtattgcagacagctgcaggcgccggtttgtttttaccgatttattatgattcgtttattgccgctgaaaccgttacggagcgctgttacgcggtgatttcgaaaaaatccggcacgccttctgaaatggtgaaaatggatattgacttttacaacctcagcggtgcgcatattgcttcactgctcggcctgacagccaaaaaggtgcggacagaccggcagctgataccaggcgttcagcagatggaggaaaccttataccgcattttctcaacatacgtaggccgtcctgtcacaagaaatgatgcgcacaccgtattttttgaattaggccttgaatcgtcacagcttctggccattattaaagacatcgaaggggcgtttgatctgcggctgaatccgactcttttatttgagtgcagcagcatatccgaactgcttgaagacataaaaacaaaaggaacagaagaatcttccggtcttgtcgcggatgcagcaccggtctctgaaacgcaatcagtcagtcagacatttactttctatgaacatgaagcattccttcaggatcatctggttttcggcaaaccggcactgatgggtgtagtgtatccgtgtctggtgcttgaagcgtccggagcgtctcattccggcacgtatcccgccgagctgaaagatatccgctttacgggcgggcccgtcacgctggagccgggagaggccgcacagattgacatttcatttgcggcagaaaagagtgccgaacgctttaccgcaagctgcactgtctccggtaaagaaagccggaagacgtgtgccgaaggagaaataagcagatatacagaggcacccgtaaaaaaatcgtatgacgttgaacaaatgaaggcgcatgcacaaaaggtagcaccggatgttatttcccgtctgtacgattcggttgccggcttcacgataggcccgatgctgaaaacggtaacggcgggatacaaaatgagtgagagctcctttttattgcagctggacttatcaggaaaaaaagaaaaaggcgatctgcgtcactttgcatttgacccgcttatattgaattcttgttatatgtcgctcggtgaagaagaattgcagctgaaaaagcggattcacgtcccgctcatgattgagaggctgacgctttacggaccagtcatgtctgataccgcctatgtggtgaatacaatcaaacataaaaaagacgggtttctctcatttgatgccgcagtcctcagtcataccggggaacagctggcggaattgaaaaacgcgtctgtgaaagaagtgcttcagccaaatcggcttgaaaatgcgtcttttgccccgtctgggaatcaaagccgtcagaaaacgaaaggaaaaccgctggatattgccattgtcgggatttccggcaagtatccgcaggccgatgatatcaatgcgttttgggaaaatctcaaacaaggaaaggattgtattaccgaaattccgaaagaccgctggaaatgggaacattacttttccgaggaccggacggcgccgggagcgatctacagcaaatggggcggattcattgacgggatcgccgattttgatcctgagttctttaagatttccccccgtgaagcggaacaccttgatcctcaggaacggctgtttttaatgcatgcgtggatggccatggaggatgcgggatatacgaggatatcacctgaactgggccgtcaggtaggtgtgtatgccggtgtcatgtatcaggaatacccgctattcgcggctgaagcgagagtgaaaggacggcatatcgggctccccggcgggatttcatccattgctaaccgtgtctcctatttttgtgattttcaagggccgagcatttcggtcgatacgatgtgttcgggttcgctgacttcattgtacatggcgtgccgggatctgcgggatcatcggattcgcgcggcgcttgccggcggagtgaatctcaccgttcatcctaacaagtacttcatgctgagccaggggcagttcatctcatctaaaggacactgcgggagtttcggcgccgggggtgacggctatattccggcagaaggggtcggggtgctgcttcttaaacgtttagaagacgccgtacaagacggagatcggatttacggcgtcattaagggagctgccattaatcacggcggaagagcgagcggttacaccgtaccgaaccccaaggcgcaaagcgaagtcatttctcaagctttacaggaggcgggggtatctccgggccagatcagctatgtggaagcgcacgggacagggacgaaattaggcgatccgattgaaatccgggctttaaccgatgcattcggtgatgttcctgaaacatgtctcatcgggtctgtcaaatcaaatatcggacatggggaatctgcagcgggcatcgccgctgtcacaaaagtgctgctgcagatgaagcacaaacaaatcgccccatctttgcatgcggatgttttaaatccgaatatccaatttgacgaagggccgttttccgtctgccgggaattaacagattggaaacggatttcagcagacggagcagaacagccgctcagggcgggggtcagcagctttggggcgggcggttctaacgcgcatatcattattgaagaatatgaggctcctgtcaaacaagcaatcagcagccaagagccggctgtcattctgctgtctgcgaaaaatggggagcgtctgacagaatatgcggagcgccttcttgcttttcttcaaaagaagcatacggataagccggacttatttgatgtcgcgtacactttacaagcggggcgggaagcgatggatgagcggctggctttcattgcggactctcttaaggagctggaggacaagctcagatcgtacttggaaaatgaaaatgcaccgcatctttacaggggacgggcgaagcgaaatcatgagacagtggctgtgtttgaatctgatgaagatttgcaagaagccatggtcaaatggctgaaaaagagaaagtacggtcatttgctgaacatgtgggtgcagggagtcgatgtggactggaacttgttatattcgggacaaaaaccccggagaatcagccttcccgcctatccgtttgcaaaggtcagatgctggattcaagatgaagccgaggcggtttcaaaacggaatgacggcaaaacggtgatccatccgctgcttcatgaaaacacatccgatctgtgggagctgaaattcacctctgtttttaccggacgggaattctttttcactgaccacacagtcaatggggagaaggtgctcccgggagccgctgtgatcgaaatggccagggcggccgttgagcgtgccgcatacgctgtgccggacggacgtaaaggaatgtatttgaaagatctcatatggatgaggcctgtcgttcataaggggacggatgtagaagtccatatcagccttatccttaagggaaatgaagacattgaatttacgatttacagcctatcggaagaacccgggggagaacggattatatacagtaaaggcaccgcggtatcaggagagatagcagcggttccgtcagttcacttagagggctggctgtccggctgcagccaatcggttatgacgtctgatgaggtttatcaggctttccggcatgcgggtatgatatacgggccgagccatcaaggaattgatcagctgatgatcggagagaggggtgctgcagcccggctgtcgctgccggaatcggcagacagtaccgccgatcagtttgtcatccatccgagtcttttagatgccgcgtttcaggcgtcactgggtgccggttcagatactgccggagacactccgatgctgccattttccctgcggcaggcagaaatatttcagccgactcagaaaacgatgtgggcgcttgtccgcaaacagagcgatcggtcagataacggagcgctgacgctggatattgatttatgtgatgaaaacggcgctgtttgtatgagattaacaggattttcctgccgggctgtccggcagacaaaccaaaccgaaagcaaacggcaggaagttcagaccgcgatgcttgcccctgtttgggacaaaactttcttttctctggaagaaaatcaagcggttgatcaggaacaattgctgatcatcggaaagccgggaaataccataaaggctgcggcaaaaatgtggccccgcgcccatctggcggagacgccggatcattcaagcgagcaaacattacgtgaattgacagccgggtatcaagatatccgccatttcttatggattgcgccggatcgtttcgcacccgcatccgtcagtcaggaaatgcttgatgagcaggagaatggggtgattcaatgtttccgtttcatcaaagcgctgctgtcactcgggtatggaaaccgaaacatcagctttacggcggtgacccggcagacacagtccgtgtatccgggtgatctgccgcagcctgagcatgcaggcgtacacggtttgatcggttcattggcaaaagaatatccgaactgggacatcaggctgattgatgcagaagaaggcagtgattcgtctgagatgaaaaacatctggcgccttcctccagatccggacggaaatgctgccgcgtaccgtaacggagcttggcacaagcaaaaaacagtccgggtgctgacaagttccgctccgcgtatgtcgtacagagaaggcggcgtttatgctgtcatcggcggagcgggcggcatcggagaagcatggagcaaatacatgattacccgttacaaggcacggatgatatggatcggcaggcggccgaaggatcaggagattcagagcaaaatagacaggctggcgctatcaggccccgcgccgcattatatacaggctgatgctcaagatgccgcagcgcttaaagcggccgtccgttccgtaagagagcaatacggcaatataacgggagtcatccattccgcgataacgcttgccgacaaaagtatggcgaatatggatgaagcttctttcagaaacgcttattcagctaaggtgaatacgagcgtccgaatgatcgaagcttttaaggaagaaccgcttgattttgtgctgtttttctcatccgtaaattctttcacaaaaaatgccgggcaaagcaactatgcggcagggtgtacatttcaagacgcctttgcccgccatatcgcttccttgcttgattgtgaagtgaaagtcatgaattggggatattggggcagtctgggtgttgtatcagacccgtcttacagaaaacggatggaggcgtcagggatcggttctattgaacccgatgaagcaatggaggcgctggaagtcttactatcagaaccgttcagccaagcggcattcatcaaagctgctccgcacggcttagccgcgctgacggatcaagatgcaatatcggttgtatccggcccgaagccttcatttatggaaagcgtcaagcggcaaaatccggatcggaatgaacggcttaagactttaaaacgagaaatggagttgcgcatatgaacagccttctttgcaaactgctcttttaccaattacagtcaatcggttttttcagcgagcctgtcactacacctgcagcatccatgcggagcgtcggcgtgatcggcacatacggcagatggctggaagaaagcctgaatctattaaaagaaaacggatatatcgcgtatgacggatacacggtcactcttctcacggatcagcgcccggacggccgcacagtctggaatgagtggaatacccataaacgcctgcttcccaatggggagcttgcacaagctgaattggccgaggcgacgataaaagcgatgccttccattttaaaaggagaacgtccggctacggatatcgtatttcccgattcatcaatgcggctcgttgaaggtgtttataagcataatcctgtcgcggattattttaatgaagtgttagcagattccgcggccgcttacctgaaagcctatcttacagaacacaccgatgcccgtatcaggctgatagaagtaggggccgggacgggcggaacgagcgccatgctgtttacaaaactgaaaccatttgcaaaacagattgcggaatattgttatacggacgtttctaaagcttttttaatgcatgccgaacaggaatacggacctgatgtgccgtatttgacaacagccttgtttaatgcggaggagccttgcgaatcacaaaatatcaaaacgggtgtttacgatattgtcatcgccgccaatgtgcttcacgccacaaaaaatatcggtttgacactgcgccgtctgaaagcgctcctgaaatacaacgggatgattttgataaacgaaatcagcgatcgttctgtttttacccatttaaccttcgggctgcttgacggttggtggtcctatgaggatgctgagcttcggattccgggaagtcccggcttatatccaaaatcgtgggagcgtgtgctgcattcggaaggatacagagcggtttgtttccctgctgaaacggctcatgatttaggccagcagattatcgcagctgagagtgacggactcgtccggatgcaagggatcagagacggcagaaagccatacgccgccccggccgaagttttccgaaagcccacgcagcctgcttcccgcagccgcgcgccagaggagcatcaagctgttaaggctgatggggaatcggtcgcttcccatgtccgctcagtcatcaaaacaagtattgccgatgtattaaaaatgaaagaagaggatattcaggaagaactgaatttctctgaatacggcattgattccattctggccgtcaatgtgattaacgagattaataagcgtttgaatcttacactgcagacaacgattttatttgattactatcatgtgaaactgctgaccggttatatctcggaagaatacgaaactatcatagcctcttctctggagaccgaaagagcgaaaatccgcccgacgcttcaggaagaacggcctgctgaaaaacctctgcagacggaaagaaaggaaaacggttatcagaaaccgaaacaagaacgtatgccgccttctttcgcaaagtccgatgactcgggaatgttccgggttgtgattgaccgtccgggcggcattgaagatctgacgattgcccgcagtgaagtgcccgagacaaaagatgacgaggttcaaatagccgtccgcgccttttctttaaacttcggagacttgctttgtgtcagagggctgtacccgacgatgccgccttatccgttcactccgggatttgaagcaagcggcgtcgtgatcaagacagggaggcatgtaacatccgtcattccaggtgatgaagtgattgtcggcatgggagaggaatttggatctcaggcgaatctcatcacatgtaaagaacatcaagtctatcataaaccggcccggctgacctttgaagaagcatgcgctcttcccaccgtggcggtgaccatgatagacgccttccggaaagccggacttaaaaaaggcgaaaaaatattaattcagaccgcgacgggaggaacggggctgatcgcggtgcaaatggcccggcatatcggcgcggaaatatatgccacggccggatcacagaaaaaaattgagtatttgcattcactaggggtccgtaataccatttgctatttagaagaagattttgaaacggaaatcatgcgaatgaccggcggccgtggggtggatgttgtcattaataccctggccggtgatgccttgcaaaaaggaatgaattgcctggcgccgggcggaagatatatcgaaattgccatgactgcgctgaaatccgctaaatcagtcgacttgtccgtccttcataacaatcaatcgtttcacagcgtggatttgcggaagctgtcccttcaaaatccggatcaggtcaaggactatcaattggaactgcagcggctggcggaagagggagtcattcagcctgtcatctcaaaaatcttttcctttgaagacataaaagaggcgtatcactgtctggatgaccgcggaaatatcgggaaaatcgtcatcagcgtttctgagccgtatcaaatgacgtaccgccccgaacaaaaggatccggccgatacagtaaaatcagcagctgtgttacatgaaaaagaaccgatcgcgattatcgggatgagcgggcggtttgctgaatcggagaatctccatgagttttgggaacacttagccgccgggcgggatctgattaaaaaagcagacagatgggatgtctctgacagccaatgccagtatggcagttttatagaggacattgaatgttttgaccccgttttctttcatatatcgggacgtgaagcgacctatatggaccctcagcagcggctgtttttggaagaatcatggaaagcgcttgaagatgcgggatatgcgggagactcggtaagaggccgggaatgcggcgtgtatgccggctcctgcggcggagattaccaggccatttttaaacagcaggggcccgcgcaggctttttggggcaatcataattccgtcactccggcaaggatcgcctatcaccttaatttacaaggtccggcgatcactgttgatacggcatgttccagttcgctgacagccattcatttggcatgtcaggggctttggacgaaagaaacggaaatggcggtggcgggcggggttttcattcaatccactcccgctttttatcagtcgtcaaataaggcgaatatgctgtcaccgaccggacgctgccatacgtttgatcaaagcgcggacgggttcgtgcctggtgaaggcgtgggagcggtggtgctgaaacgtcttagcgacgccgttagtgacggagatcatgtgtacggcgtcataaaaggatctgcaatgaatcaggacggcgctacaaacggaatcaccgctccaagcgcgctttctcaagaacgattggaacgtcatgtctatgatactttccacattgatccggaaaccattcaaatggtggaagctcacggaacgggcactgcactgggcgacccgatcgaattcggcgccttaacgcgcgctttccgccgctatacggataaaaaaggatattgcgccatcggctctgtgaaaaccaatctcggacatgccgctgcggccgcggggatggccggactgtttaaaatcctgctgtcgctgaagcatcggcagattccggcttccctgcattttcaccaagccaatcagcatattcaatttgcggacagcccgttttttgtgaatgaaaagctgataccgtggaaacggaatccggatgcaccgcgcagagccgctatcagttcattcggattcagcggaacaaatgcccatcttgttattgaagaggcgccgcaaaccgtgcgccggtcgccggcaaaaccggcctgcctcattcctttatctgcgcggacggagcgtcagctggaaattcaggcagaacgcctgctggattcactcagcaagaacaaagacagcgatctgggaaatataagttatacgctcctgctcggcagaaagcatttacatcaccggtttgcctgtatcgtaagcagtgcggacgaactgaagcgggtattatcggagtggcttgtaaaaagagagcttccgggtgtgtttgtgtccaatttgaaggatcagaagccggcagaagaagccggaatgaaaacattcggaatggaatgcattgaacagtgccgctcggcggcttcgcccgcgcagtacagagaaagcctggcacatatcgctgaccttttttgcagagggtatgatcttccttttacacggctttttgacggagggcaatattataaaacgccgcttcctgcctacccgtttttaaaagaaaggtattgggcggctgatgtaaatagttctttaccaggccaagccatgaaaaagtctgaaacgcaaaccgttctcccgtcttcgccgcagcctgaacatgaagggctgatttctctgactcctttaactgagatcgaaatgagagcgtttgaaccggagacattgcaaaagccaatcgtgttacagcctttggattgtactgtttctgtccagcagccagaaaaagccgtttccgaagacaatagaacattgcttgaagaattgaggacaagcctggcagatattttatttttgtcaccggaagatattgatgctgatgagcctttcatcgacatgggtcttgactccattatcggggttgaatggatacaaacagtaaataaaacgtaccacactgagattactgccaataaggtgtatgaacacccgacgcttgaagagcttgcggaatatatagcgggacaaataaagaaacccgagtatgctgaagcggaggaaacagcggtacgtccgcaaatcccggaagcagaaactccccttgccggcatctctgacggcactttgcgcaaagagctcaaagaaagccttgcggacatcctgtttctgaagccggaagatattgatgagcatgaggcattcattgagatggggctggattctattatcggtgtggaatgggttcagtccattaataagacctatcaagcgtctattacggcaaatctggtctatgaatatccgacaatcgcaacattagccgggtatctgaccggttctgtccaaaaagacaccgaggaagtacatggggaacatacgaaacaaaacgatatatcagaagagacagatgatcaagaaccgcccgagctgatctgtcttaacccaaatggaaagggaagaccgattttctggtttcattccgcgctgggggcagtggagctgtaccagcctgttgccgaacggaccgggcgtcctttttacggaattcaggcaagagggtggatgacagaccgggaaccgatccgcggcattaaaaaaatggccgaatattacgttaagctcatacgtaccgtgcagccccggggtccttacgatgtaggcggctattcattagggggcatgctcgcttatgaagtcacccggcaattgcagctggctggagaaaccgttgagtcaatcgtcatgctcgactcctttgacgcggcgggtgcgcgggaaataaacattcctgatgaattatttgataaaaatatgatgctgcagacggtgaacatggctttatttgcaccgatttatcaacatccggaacgcatttctgaaaccttgattcaccgtgatgaactagatgccgatcttcatgaagacatatttttagagcaattaatcgcaaaagccaaacagcgggggttaacgaagacggacgcgttggtgaaaaatctgatcaggcagaatataaatgttcaggacgcttacgaaatcactgattacgaactcctgccgcttccggatccgaacggggtgacatgctattatttccgaaataaaaacggtattttcttgggtgagcttgatccgtattttacaatcagggctgatattttatccgctgatttcgtcaactattggagccagtgggaagagcatatgacaaacatcgccatcatggatgtggcggtatccaatcatatgacgttattggctgaagacagcgcagccggaacgatttctgaattttgcggcgttttatattcggcagacggaatgacagaatacagctttctgcagctgcaggaaaagatactgaacgtgcatggtgagatgctgaagcagcccgccaaaacaagaccgtaaattcacatatccgcccgccgggtttactcgtaagctttggcgggtcatttcaaatcttgaacacatcttggaggaatgaaaatgaccagtttaacaaaaatcagacagcagcagccgtacaagtggtaccaaacgatgagagaaacctctcccgttcattacaatgaaaaggaagattgctgggaaatcttcacctatgatgaagtgaagcgggtgatttctgactacagtcatttttcttccgatcataaatacttaagtgcggacaaacaggaaaaaatgatccggcatattaacaaagacagccttttgaaaatggacccgcccgaacacaccgtcttcagaaaattggtcaatcagccgttcatgccgaaatcggttgagtctcttgcaccgcgtatagccgctatcgctgatgacctgcttcaggccgtccgttcaaaagacaggatggacattattgaagattacgcatttccgcttccgattatcgtgatcgcagagcttctaggatttcctccgaaagacagagatatctttaaaagctgggtcgaccaaagccagaatgtaaaagatgaaaagaaaatgaatgaagtgcaaaagcagatgatcggatacttcatgcagtttattttacagcggagaaaacagccgcaaaatgatttaatcagtcatttaatttcagctgatttagacggagagccgctgtcagacaagcaattaatcggtttttgcggcttgttgatcgtcgcggggcacgtaacgacggaaaatgtgatcggaaattcatttctcagtctcaaggagttcccgcacattctgccccggctgcttgaaaacaaggcgctccttcctgactttattgaggaagtcatccgcctcagaccttccattcagcgggtaacccgctacactgcggttgagagcgagattggcggaaaaacgattccggccggagaaaaagtgtatgcgtggattggatcggcgaacagagatgaaaagaagtttgaaaatgccgatcagattgacttgggacgaaagccgaatcagcatctgtcattcggtcagggcagccattattgtttaggagcgccgctggccaggcttgaagcgaaaatcgcgctttcccacttttttgaacagatgcccgcatggcgttttactgaggatcaagagccgaatctggttccgagccctgtatttcacggcgttgacaggctgcttgttgagttttgagcgaaaaaataaaagaggcttccacaggaagcctctttactctgggggcttggagaaatgaatgtaggaatcgaagcaatgaacgtttttggcggaaccgcgtatgtagacgtcatggagcttgcggaacatcggaacttggataaaaaaaggtttgagaacctgctgatgaaagaaaaagtggtggcgcttccgtttgaagatccgattacgttcgccgtaaatgccgcaaaaccgattatcgactctctgtcagaagaggaacggaatcagattgaaatggtcatcacctgtacggaatccgggattgattttggcaaatccatcagtacatacgtccatgattatttgcagctgaagcggaattgccggttatttgaggtgaaacaggcttgctattctttaacggccgggtttcaaatgggcgtgaatctcatcttatcgcaaacatcgccgggagcgaaagcgctcatcatcggaacggatatttcccgctttttagtggctgaaggcggtgacgcgttgacggaggaatggtcctatgccgaaccgagtgcgggggcgggagctgtggcgcttttagtcagcagcacccctcatgtctttttgcttgatcaaggcgcaagcgggtattacgggtatgaagtcatggatacctgccgcccgattccggatagtgaagcgggggatgctgatctgtcgctcatgtcttatttggactgctgtgaaaaatcatttcaggaataccgaaagcgtgtgagcggggcggattataagaatacatttcaatacctttcttttcatactccgtttggcggaatggtaaaaggagcgcatcggacgatgatgagaaaattggcaaaggctaagccgcaagacattgaagcggattttcagcaacgcgtgctgcctgggattcaatactgtcagcgcgtcggcaacatcatgggggccaccgtatttttatctcttgccagcacgattgataacggctcttttgaaacgccgaaacgcgtcggctgtttttcatacggttcgggctgctgctctgaattttacagcggtgtcgttatgccgcaaagccgtacgcggcagaatcaatttcagatcagccggcatttggatgaacgcgtccgtttatcgatggctgattacgaccggctgctccaagacagcggcatcgtaaaattcggcacaagaaatgccgcgcccgcagcagacatcccgaatgcgcatcaaggaaaaacgcgattggtgctgactgaaataaaagagtttcacagaaagtatgaatggacgacttaatatcagaaacactcagagccggaaaggcttgagtatttttaaagaaacggagaataaacatgaatccaatgattgatgtacaggaaacagaaccgggcattgtgcaggtcacaatgcaggatacggccgggaaaaacgggctgtcagaagagtttgtcagagagctgcaccgggtattccgagacatcaatgcccatccgtcctataaaaccgtccttctgacgggttacggaaattatttctgcaccggaggaacgcaggaggggcttttgaccattcagagcggaaagcttcaatttacagatttaaagcttcacagtcttttattggattgcaggattcccgtgatttccgtcatgcaggggcatgcgatcggagccggctttacgatcggtctgagcgcggatttcgtgattttaagcagagagagtttttattcttgtaattatatgaagtacggatttacaccgggaatgggcgcgacgtatattgtgcctgaaaaactgggaattgtcctcggggaagaaatgctgtttactgccgcgaatttcagcggcgccgctctggaaaaacggggagttccgtttgaagtgctgccgaaaaaagacgtccttcaaagaggccgcgaattagcccggctgctggcggataaaccgagagcctcactggttgcgctgaaaaccaatgtgaccgcacggatcaaaagagagctgacaaaagcggttgaggaagaggtgaacatgcacgaagccacattccatcttcctgaagtaaaagagagaatcagccgcttatacggcagttaaacagaatgaaaaaagcatgggaagccccatgctttatcactggtccgtcttttgcagaacggagcctgcgaattgttctttaatttcggcgctccgtgctgcggtttctgcgatgcagtgcatgatggcttcttcaaagcggcgctcttctaatgcgcgaaggcctgcttcagtcgtgccgcccgggcttgtgatttccttgcgcaggcgttcaggccgtttgctgcttgttctgagcatttccgtcgccccggccatggtttgtaaaatcagctcttttgccgtttcttccggcaggccggcttgaagggcggccttttccattgcttcgacataccggtacacataggcgggaccgcttccggcaatggctgtgacggcgtcaaggtgtttttcttcaaagcgcgtcgcttctccgattgtttccagaagctcttttgccgtccggatttcagcttcactcgcctcggagcttgcggaaaaaccggtcgccgattgctgaatggccgcggatgtattcggcatcgcccggatgatggtgagctttctgccgaaatattgctgaatcgtgtgaatcgtcagccctgcgatgacagaaatcacaagctgatctttcacgtattcgcgaatgttctcaatgctttctgccgcatctttcggtttaaaggcgagaacgagaatgtcggtattgctgaaaaactcttctttatcccggcacggttttactccgtacgttttttggagctcttcaagccggctgtcatttgaccggtttgtcatatatatatgtccgggggctgtcattccgctttgcagcagtccgttcaccattgcttccgccattgatccggccccgataaaaccgattttcttcatataaatcctccttcttctcaaaacacaaaaaaaccttcccgtcaaaaaggacgaaaaggtttcgcggtaccaccttacattagcacgaatcagccgtgctcagctcaaatcccgtaacgaggggatacgtttaggttttcctaaccgctctgagggcaggttctgtaaacaagagggccgcaatgtctttcagccggggacattgctctctgctgccgttgtttatatactagttcctcgtcatcgcgttccgtgttttctagtttgttgttcattatgctatgcgcaagagcgggatgtcaatctttttttccgatatgcggcaataatgacacagtgaaaagaaaacgctaaaatatgattattcaggaatgaaaagaacgaaggagcgtaaacatggcagcgagaaagatcattccgatacgtgtgccgactccgtttgcagtcggcgacgttatcgtttatttagtaaaagatgaagccttaacccttattgattgcggcccgaatacaaaggaagcggctgaatcgctctcattgcagcttaaggaacacggggtttctgcggcagatatagaacaggtggtgctcactcatcatcacgcagatcattcaggtctgctgcaccttttttccgacgatgcggaagtagtagggcatccgctgaatgacaggtacattactcaggatcagtcgtatatcgcccggcaggaggacttttttctgtcgcttatgactgaaatggacgttcccctgacgcctgaagacatacataaaacagttaagctgtcatacttattttctgcaaaccgtccgttaacgaaaacagtgagggaaggcggaaaaattgacgggcttaacggctggacggtgctcgaaatcccgggtcatgccgcttctcacattgcgctctaccatgaaaaaagcggtgaaatgttcagcggcgatctgcttttatccaacagctccaccaatccgattctggaagctccggaaaaggggggcgtgcgcgcggccccgatgctcgactacttgaactcaatgaagcggctgcatgacgtaaacccgtcctttttatatccgggacacggcgatctgctgacagacgtaaagcctgcttttgacaggcggcttgaaaaacagagaagtcggtcggaatatgtgctgcgcctgttgtcagaggaaacgctgacggctttccaggtatgccggcggctgtttccggctgtgtatgaaaatgaattgtttttaacgatgtcagaaacgatcggccatcttgacgtgctggccgccgaagggaaggctgtatcctttcagtcggggaacactctgaagtttaaagctgtgaaggggtgaaggaaatgggcagattaacggataagcggatttggatcaccggagcatccggcggactcggagaacggcttgcatattcctgcgcggcagaaggggctcatgtttttttatccgccaggcgggaggaccgcttgcaggaagtgaaaaagacgattaccgcgcgcggcggacagtgtgatgtcgttccgtttgacgtccggcatgcagaagaggctgaaaacgtaaggcgtttgatcggtcatgttgacgtattaatcaacaacgccggcttcggcatttttgaaacggccgctgattcatctttggatgatatgaaggcaatgtttgaagtcaacgtcttcggattaatcgcctgtacgaaggcctgtcttcctgtgatgcttcatgcgaaaagcggccatattatcaatatcgcctcacaggccggcaaattggcgacgccgaaatcaagcctttattccgcaacgaagcacgccgtgttagggtattccaatgcgctgcggcttgagctggacggtacgggtgtagctgtgacaacggttaatcccggtccgatcaaaacagacttctttacaattgcagataaagagggcggttatgtgaaaagcgtcggcagatggatgcttgatgccgaccatgtggcagagcgtattacatccgtgattctgacggataaacgggaaatgaatcttccgcgatggatgagcctcgggacgaagctgtatcagcttttcccatcgtttacagaaaaactggcaggccgcgcattaaagaaaaagtaacaagggggaaaaaggaatgtccgaccgggatatacacaaggcattgatggcagagcctctagtcaggcaaatggcggaggcgcgtgaagtattttggatcaatccgcataaaaccgttgatccagtaaagcatggcgctgaatggaaaaaggagattgccgaagcggaagaaaggctgcgccggtttgcgccttatatcgcgtcggcttttccggagacggaagcggagggaggcctcattgaatctccgcttgtcttgattaatgaaatgaagaagcatctggaacacagcgccgctcaggctttccccgggcgtctgcttttgaaatgcgacgacgaacttccgatttccggttccattaaagcgcgcggcgggatttacgaagtgctgaagcatgccgaagatctcgcggtaaaagcgggaatgctctcagcagacgacgattacagcatattgactgaagaacggtttaccgcttttttctcaaaatactctatagccgtcggctctacgggcaatttaggtctgagtatcggcataatcggcgcgaagctcggcttttgtgtgaccgttcatatgtccagtgacgcaaagcagtggaaaaaggagctgctccgggaaaagggggttcgcgtcatcgaatatgaagcagactacagtctggctgtcaaagaggggcgcatgcaggcgaagcaggacccttattgttattttattgatgatgagcattcccgggatctgtttttggggtatgccgttgcgggaagccgtgtgaaaaagcagctcgatcaaatgaacataaagcctgatgcagatgaaccgcttttcgtttatttgccgtgcggggtcggaggaggtccgggcggcgtcgcgcttgcgctaaagctgatctatggcgggcatgtccatatttttttcggtgagccgacgcattcaccgtgtatgctgttaggactgttttccggcttgcatgacggaattagcgtgcaggatatcggtcttgataatcaaacggccgccgacggactcgcggtgggaaggccgtccgggctggccggccctctgatggagcctatactaagcggctgttataccgccgatgacggcacgcttttttcgctgctttatcaattaagggcggccgagaataagagccttgaaccctctgcactcgccggactggccggagccgtcaagatcgttcagaccgaagccggaaaccgttatataaaagagcgggggcttgagatggaaaatgccgtgcaccttgtgtggagcaccggcggaagcatggttccggaggaggaaatggaagagtacagccggatcggttcctcatttttgaaaaaaatgggcagacagtgaagcggttttccgttacaatctttgtaagcgtttgtttttttatcggaaagccatacagagagattggtgtgaattgtgaaaagtaaagaattgaacttacatacattgtatacgcagcacagccgcgagtcgtgggccggattcggcggccatctttccattgccgtttcagaggaagaagccaaggccgtagaggggctgaatgactacctgtcggtggaagaagtagaaacgatttatattccgcttgtgcgcctgctccatcttcatgtcacgtctgccgcaagacggaatcagcatgtcaatgtgtttcttaagcatccgcattcagcgaaaatcccgtttatcatcggaatcgcgggcagcgtcgccgtcggcaaaagcacgacggcgagaattttgcaaaagcttctttcccgtctgccggacaggccgaaggtgagcctggtgacaaccgacggtttcttgtatccgacggcggaattaaaaaggaaaaaccttctgtccagaaagggattcccggaaagctacgacgtgaaagcgctgcttgagtttctgaacgatataaagtcggggaaagagagagtggaggcgcccgtatattcccatcttacgtatgacagggaagagggcgccgtcgaggttgtcgaaggtgcggatatcgttattatcgaaggaatcaatgtcctgcagtcgccgaccttagaggacgacagggaagatccgcggatttttgtatcggatttctttgatttttcgatctatgtggatgccgaagaaagccggattttcacgtggtatttggagcgtttccgcctcttaagagaaaccgcttttcaggatccggcttcttattttcataaatttaaggatttgtctgatgcagaagcggataccatggccgcctccatttgggagagcgtcaaccgtccgaatctgtatgaaaatatcctgccgacaaaattcagatcggatttgattttgagaaaaggtgacggccataaagttgaagaggtgctggtaaggcgggtgtgatgggaggaggaagcgaatattatgatgcatcatattgagttgtatgtatctgacttgaaagcctccgcccggttttggggatggtttttaggtgagctcggttatagggaatttcaaaattgggactccggcatcagctggaaaaacgcaggattttatgttgtgcttgtacagacagaggagcgttttttaacaccggagtaccacagatgccgggtcgggctgaaccatctggctttccatgctgcatcaagagagcaggttgacgagatgacagaaaagctgcttgccagaggatgccccgtgcttcacagggaccgccatccatatgcaggcggaagcacgcattacgccgtatacacggaggacccggatcggataaaagtggagctcgttgctcctgcttctgaatgaactataacttttcgtttttttcttcgcgcagcgcgtcgagtttcttttcgattctgtccaattgtatgcggcgcttgttcaagcttctgaatacgtatatcacggcaaacaggaaaaatgcggctgcaataaatgaaatcaattgaaaaatgacatcaccgatgttcatcttttttacctccgtgtgcggcgggtttcttcagcccgccgttttttcattttgaccgatgtgaagacatgggggatgaatcatttctctcctagctttgttttttttctgagaatgaatagtttctgcatgtggcttatgaccacttttgcggccgcatatcccggaatggccagaagcatcccggcaattcctgagaatttgccggcggcaagcagaagaaaaataatggtcagcgggtgaatgtccagcttccgtcccataatttgcggggaaatcagctggctttcaagctgctgtacaatgacgacgaccgtaatcaccagcaccgcctcggtcggtgaatcgaacaatccgacaatgactccgggaaatgtgccgatccaaggcccgataaacggaatcaggtttgtcaccatggcgaacgcgcccagaacgagcggataatcgagcccgattataaaatagccgattgtgacgagtacgccgacacaaaaactgacgagcagctgtccttgtatgtatgaactgagagcttcatccatgtcctgaaggatttgttttccttcttttttatgtttttccggaagaagccgcagcagtcgccggggggctttgtttccttcttttaacatgtaatacagcgcaaacggaataatggctgcggtgatggcggcattggcagccgtaccggccaggctgccgagagaatcagcgattgaaccggaataatttgcggctttgtctgctaattttttaaaggaatccccatgctgaagccgggaaaaccatttgctgtcctggagatgcccgatccaattttcagcttttgcggaaagctccggaatatgatctgtgaaggctgtaaactgtttttgaacggcagggcccgccgtataaaggaagaggacaaaaaggccggctgttcccgcataaatcgctaaaatcgcgattccttcgggcagctttaatttcgcatgcagcagtctgacgagcgggcggcacaaatagtaaaggacgcccgataatacaatgggcggaaacaaggttttaaccgtaatcacaacaggctggaacaaaaagtctattaatgttccgagataaatgatgagaaataacagaagaacggcatagccgatcctgaaataaggcccgacaggcatatcctgcaccacgcaatctttaaaggtttactctcggacatttcccttatcgccgggtgcataaacgtccgtgtcaggaaaactgcccttgattggtgacgtaatcgtagataatatcttctacatgggcatggagatcctcatcgggttcttcattccttctttcttctaaagctttttttaaactctgtttttcataggggctcagcggatctgtcgacacattccgtccatactggcggagggcttgtcccagcattttttctataaattgatccatcatatattctcctattcttgtcattcatctttattctactaaatatcatgtgatcctcccactcttctatcatattttctgtcagggccgggttaggatttttattccaattcagctgagagaatacgatgaaacggcagcgttaacgcatcttcatcgtttatgatttttaaacgcttttcgtcatgcctcacttgttttacccagccccaaaagcggcgggggccgtgtgcggaagcgtaggtgaccgaaatggccctgtcttcttcaatcgacgccgcaatgatgcggttcatgtcgttcagttgctcttcgctcagttccggaggccggaattcccgttcttttcgttttttcgcaagcagctgctcccgatgttcgggcagcatcatccggcttgattcccacatgacattatacccgggtgttaatttgttcggattcatgtatatcacctcaaattatttgtaatgcccgccgattttttcagcccggtgaaaggcttggccggcctctgtcagtgaagcggcatggaggagtgacgcagggccgtaccgctcatgaatatcatccaatactttgccgagactgatctttttttcctgggcatcgaacaggctcagctgaacataatcacaaggctccagctgggaaagggagacgccggcgctgcggacgggctcaccgttccaatgctctttgaagagcttgaccgccgctttaaaaatatccattccgaaattagtcggagacaccagctttctctgtctgtgaaaacctgaagggaattcaaaatcagcgcctctgatgctgaccgaaaccgtatggccgatgtattgtttgaaacgggcgcggcgggccacttcttcgcttaactccagcagcacgactttgatatcctcaaagcggctgtagtctctcgggagggtcatgttatggccgatcgctttttgccggctgtgcgtgttgacggtgaccggagagggatcgatgccgcgggctgtccgctgaagcaattcgccgttaatgccccagcgttttttcagcaattcggcggggtgtccggcaagcccgccgattgtgctgatgcccatccgtcttaaatgatgctccatccgttttccgatgccgaataattttccgaccggcagcggccacagatcctgcctgatatttgacatatccaatctgtggatgccggatgcgttttttttggcaaaatggtcgcaagccattttcgcgagcgccttattcggcccgatgccgacacgggcataaatgccgaattcacgcataatcgcttgctgaatgcttttggcaattgtaaaaggatcaccgaacagccgcctgcttccggtcacgtcgagaaactgctcatcgatggagtagggttctacaagatcggtataccgttcaaacagttcggtaatcatgacggatacatcaatataccgctgcatccgcggacggacaataacggcatcgggacatttggcctgcgcttcccacagccgttcggcattttttacgccgtatcgtttggcgagcggacaagccgcaagcacgacgccgctgcgtctttcgggatctcccgagacaatcacgggccggcttttgagatgaggcgcttccgctttttccacagacgcataaaacgattgcatatctacaagaagaatatcagccataaaaaaacctccgggaacatttgttctgtttttcattgtacccgaacaatgatcacgtttatactggtaaatcattccctggctggaaggcgtgctgattcgtttgcttgaaaagaaatcatttacaattgcaaacaacccacatataattttttatattccaatgagaagagctgacattcattttgccggacgaaaaggagagtcaatcgataatggatattcgaacaattacctctgaagactatgaaatggttacgtctgttttgaatgattggtggggcggcaggcagatgaaagacaaactgccgcgcttgttttttgaacattttcaggacacaagctttatcacgtacgggccggagggaatgaccggttttttaatcggttttcagtcacaatcagaccctgagacagcctacattcatttttccggtgtgcatccggatttcagaaaaatgcaaattggaaaacagctctacgatcgatttatggagacggtgaaaaaaaggggctgcacaaaagtcaattgcgtgacggcacctgtcaataaagtatcaatcgcttatcatacaaaattaggctttgaagctgaaaaaggaaccaaaaccgtaaacggaatccctgtttttgcgaattatgacggtccgggagaagaccggattctgtttgtgaaatatatgtagagggggatgaatatgggttttttagctgacacgcccaaaccgccctattatgcggtcattttttcatcaataaagggaaaatatgatgaggaatatgaacatacggcagagcgcatgatgaatttggcaggcggacagccgggctttttaggcgcggaaagcgttcgggaggaaaacggctgcggcatcacggtttcctactgggacagcctggaggcgattaaaaggtggaaagatcatactgaccaccaggcggcaaaacaaaaaggaaaaaccgcctggtatgaagcgtacgcggtccgcattacgaagacggagtcacagcggatgtttgcgtcaaaaggggcggaagattgattacatttttacagcatacacaagaacagaccgcgcgggaaattgcggcggttcagcggtgcgcttatcaaaaagaagccgagctgatcggctttttcggcattcccgccttgcatgaaacacccgatgatatacagcggtcacgggagacgtttgccggtttcaaggaaaaagatcagcttgcaggcgtcatttcgtatgaaaaaaagggatatgaccttgtcatatgcaggctgacggtgcacccgtccggctttcgaaaaggaatcggacgggcgcttattcaatttgtgatagatcaaaaccgggacgcccaaaaaatagaggcggctaccgccagccaaaacgttccggcagtctctctctatttaaaaaccgggttcacagaagccggacagatagagacgccggaagggctgaccctctcgttttttcatctttatccgaagaggaaagcggaagttgttccgtacaagccggaatggaaagaaacgtttgaaagagagaaggcggacttgatccgaatcttcggcccagcacttcattctgtcagccacatcggcagcacctctatcccggggatggccgccaaacccgtcatcgatatactggcggaggttaaagatatttcggacgctgaccgattcagtccgcagctggaagcactcggctatgaggcgaaaggggaaaacgggatagagggccggcgtttctttcaaaaaggcggcaacaagcgcacacaccacgttcacatatacgaaacaggccatccggacgtgaagcgtcatctgctgttccgggattacctcaccgcaaagcctgaaaaagcggctcaatacatggaactgaaacggcacctcgctgagacatacccatacgatatggcaaagtatagtgaagggaaaaatgactggatcaaggcggctgaacaagaggcaaaggactaaggagagcgggctgctgtaaagaaagcagaaacaatgcatacagcggctcggtatgctacaatggcgaaaatgaaaaacggaggatcatctatgcaaatacatgtgacggatgcggcgaaacacacacttcagcaggcgatggacgccaacccggggaaaaaagcgcagctccgctatgatgcagaaggctgcgggtgcgcggtgagcggcgtgccgaccatctggctggcggacgaattaacgggacaatgcgaagccattgaaaccaacggacttccgctttacatccagacctcacaaaaagtgttttttgacgaggaaatgacaatcgattacaatgaaaaggcaaaaacgctcgtcttaaaaagcccggcagagatgctgagcccgagaatgagcatattagtaaagcagggagaaacggaaagtgaatcaaaagctgaaagccattaaacagacggcacagcataaaacgtgggtatcctttctgaacaacaaccacccgtacagtctgctgcactggtccatcggaggcgctgaatccgttcagaaggatgtctggctgcttcaggatgagatgaccttcaaagcgcaggagtttatgacaatcgacctcgccattgactggatcggagaaaatatggacgggattaccgacgttttatgacgggaaagcgaaagaaccagcatacgttctttcgcttttttacgtttgcgtcatggtatctaaaaaggtttgaacggctttacggtagctctccggatttttggtgtatgacatggcatgcccgcccgattcggccagatagagcatcttagggccgcgttttctgcggtgcagcaattcggaacaagcggagggtatataatcatcttccttactgtgaataaacagcacgggctgccggatgcggctgataaccgataaaggcgatacatcacggatacggtatccttctctcatccgcaaaaagaaatcagccaaaggcagaagcggccacggaggcagccggaactcccgcttcagcctgtaggcgagctgatcgcgaaagcttgcgaacggacagtccgcaatataaaaatcagcgccgttttcatcctgatgcccgcccgcgtataataaggccgtcaccgcccccatcgattccccgtggatgccgattcgaccgccgtctccggttttgtgtctcacccaattcacggcttcttccaaatcatctttttcaaaatagccgtagctcgtcgttctgccgccgctttttccgtgcccgcggtggtcattcatatacgagcacattccatcctaaatctaaaaataaatccatgtatttcaatgaattgaacgaatttacggtaacgccgtgacaaataatcatggtgtttgccgtatgatgcggggcgacgtaaaagcctttgatctcatacccgtggcgtgacaggatgacggcttcttctttttccatggcctgaaaggaatcaaatctatcatgcccgtccgccgtttcttttttcatgatatcttcatccgtctttttcttcataaacataatcagattcgtaaaagcgaatccggcagccaaaaagactgcgcaagccgagccgaacaccgccagccattttttcacacaggcaccctcctttcatatgaaaaatccttcctccggcttttcaggaccgtgaacgttgccggcctccggcgctccgtggtacacttgcttcaccatattcagatacggggggcgtcatgatgaaaaagcagctgcctaacgaaaaacacagcttaaaagacgatctgggggaagatctgaaggccaggcttttgcaaatgaaaagtgagctgaaggaagaagacgagaaaaaacaggcgcagcaaaaggcggaacaaatcagaaagcgaaaagaaaaagaaaaaaataaaagctttgaagagcttctgaatgaaagcagtctcgattggctcaaatataaataaaccggcatctgacaaggtgccggttttattgtttaagaacgatgggcttcgtatacgtcccgttttgtatggtattgcagggctttgatttcctggctgcttaaacgccgggcctctgcagccgaacagttttctctcagctgctcaagtgagctggctccggtgatgacagaagcgacggccggctgtgacagtaagtattgaagagaaagctccgtcatgctcaagtcaggtgcggcagcgctgatcgcttttttggtttctgccagttctgcaaaagaatatgttaaatagccgttctcttttacgcttgcggccgcttgatcaagcggtttttccgtaagaagccctttagcgacaggccctcttgcgactacgctgattccgttctcctctaaaaggggaagccactcctcgggacgccggtccagcaggctgtattgcatcataacgctggtgatatttgattttttcacatattctttaataacattcggacgaatcgaggaaatgccgtaataccggatgacaccttcctgttttaagtcctcaaatgcttcgatcgtttcgtcaatatggtcttccatcgtgccgccatgcagctgataaaggtcgatatagtccgttttcagccggcgcaggctgtttttgaccgcttcttttatgtatcctttggaagcgtcccaatgccagccgtctttatcatcattccagcggtttccggctttcgtggctaaaatgatgtcgtgcctgcggtttttgacggcctccccgacaatttcctcatttctgccgaaatcataaagatcagcggtatctaaataattgattccaagctcgatcgcttcatctaaaatagacagcgctttagctttatccgtgcccagcgacatacagccgagcccgatttcgcttatttctaaatcagaatgtcccagtgtgcgttttctcatcgtttcgctcctttttatagtcttttattgaccgtaatataaaggcgcgaagttttcaactgttaaggcccggtgatccaatctccgatatagcggaatgtccgtccgtattctttcagtttagcccgcacttcccacgcctttccgaccaatacgatactcttatccttccggtacaccttcaatcgaaaagcacctccctctcatgcatgtatgataaaatatatgaggcataatagagagacagaacgggagatgacatgatgaaacatttagaagaaaaaacacttgcgaaaaaaaagatgtatgacgggaaagtcatagatctttacttagaggatgtagagctcccgaacggaaaaacaagcaagcgggaaatcgtcaaacatccgggagcagtggccgtacttgcggtgaccgaggaaggaaaaatcattttggtgaaccagttcagaaagccgctggaacggacaatcgttgaaattccggccgggaagcttgaaaagggggaagagccggaacatacggcgttaagagagctcgaggaagaaacgggatatacggcggaaaccttgacgaaaatcaccgctttttatacatcacccgggtttgctgatgaaatcgtgcatctctttcttgcggaagggctttcgtcgctggaagaaaaacgagagctggatgaggatgaatttgtcgaagtcatgcaggtcacgcttgaagaggccgtgaagctgattgaatcccgcagggtgtatgacgcaaaaacggcgtacgcgattcagtatctccagctgaaagaagcgctgaaggaaaaatgatgaaaaccatctatgcggatctgcatattcatatcggccgcacctatacgggaaaaccggtcaaaatcaccggggccaaaacgttgacgctgcaccggattttagaagaagccagtgaggggaagggaattgaactattgggcatcatcgactgccattccccggaagtcatagaagaaatcgagcgcggaattgatgaaggcagataccgtgagctgaaagaaggcggcatccggtatcggaatacgacgcttctgttgggcagtgagcttgaaatctatgatcacacatgccgcgggccgattcacgttctcgtctttatgccgtctcttgccgaaatgaagatgttttctgagtggctcgcaaaaaggcttaaaaatatccatctcagttcccagcgcatttatgaaaccggtttgaatcttcaaaggaaaacaaaggaattgggcgggctgtttattcccgcccatatgttcaccccgcataaaagcctgtacggaaaaggggtcagatcttctttgacagaggttttcgacccgtcgctcattgacgcggcggaactcgggttaagctgtgacaccgacatggcttcgcgggtagcagaacttgatccgtatacatttttaacaaattctgatgcgcattccttaggaaaaatcggcagagaatataatgaaatgcttcttaaagaagcgaatttcacggaattttcgctggctttaaaagggaaggacggaagaaaaatcacggcgaattacgggctgaacccgaagctcgggaagtattaccggacggcttgcgaccgctgcggcagcccggttgaaaaaggagcttccgcatgtccggagtgcggggggaaaacaatgacaaaaggggtcagtgaacggctggaggaactgagcggcccgaaaaaaagccgcgtgccgcggccgccgtatattcatcaaatcccgctgcagttcattcccggggtcgggccgaaaacgttagaaaaactgaagcgggctttcgggacagagatggcgattcttcatcaggcgcaagaagaggaattggcgcgtgtcgtccagcctaaaatagcggctgtcattcataaagcgcgcaccgggcagctcgtccttgaggccgggggcggagggacgtacggcagaatcaagccgtaaaagccggtttttagcggagctcctcctgcaccttctttttcgtgcggacaaacgcaatcaattcgatgatttcatcctgattcagcggctgtccgtcaacggtcagtgtgccgcggccttgtgcggcgtttgttaattcgatggtctgggcaaacggctccgcctttttttcagtgcgccccagtaaatcgtcgcacgtcgtgtcaaacagatcggcaagcgtgcccagcgcctcgaatgacggacgccggtatcctgattcatacccggcgtacgtgcttttggcgatgccgagacggtcagccgtatattgaagagaccaatttttcttttttctcagttcagttaaacgatctaaattcatattcaaaaccgctccttttcacttgagcaaattatatcatatcgatatgcaaaagtgtacgcgaattgaataataatcacttgattaatttcattcgtctgtctataatttgattaaaagtatgcgaaaagcgaatgcttaacacatcttgagaaatggatgaagaggtgcagggtatgaaaaaattattgctgttaacaaccggaggaacaatcgcctcagtcgaaggagaaaacgggcttgcacccggggtgaaagcagacgaattgttaacctacgtatcaaaacttgataacgattacacgatggaaacccattcgttaatgaacatcgacagcacaaatatgcagcctgaatactgggccgaaatcgcaaatgctgtcaaagaaaaatatgacgcatatgacgggttcgtcattacgcacgggacagacacaatggcttatacatcagcggcactgtcttatatgcttcagcatgctgataaaccgatcgtcattacgggttcgcaaatcccgattacatttcaaaaaaccgatgccaaaaaaaatatcacggacgcgatccgcttcgcatgtgaaggggtgggcggcgtatacgtcgtatttgacggcagagtcattcaaggcacacgcgccattaaattaagaacgaaaagctatgatgcatttgagagcattaactatccgtatatcgcgtttattaccgaaaacggaattgaatacaacaaacaagtgcacatgccaaaagacgatgcttttacggtcaatacttcactttgcacggacgtgtgcctgctcaagctacacccggggctgaaaccggaaatgtttgacgcattaaagggcatgtacaaaggaatcgtcattgaaagctacggcagcggcggcgtgccgtttgaaggaagagacattctcgccaaagtcaatgaaatgattgaaagcggcattgtcgtcgtcattacgacacaatgtcttgaagaaggagaggacatgagcgtctatgaagtcggccgaagagtcaatcaagatctcattatccgctccagaaatatgaacacggaagccatcgtgccgaaattaatgtgggcgctcggccagtctcacaacttggctgaagtcaaaaacattatggagacaccgatcgcagacgacgttgtactgtaaaaacatgactaccacaaagagaaagtagggttttagcatgacaaacgcgcaaaaagaatatcgtcaggaaaaagatttcctcggagaaaaacaaattgaagctgatgtgtattacggaatacaaacgctgcgcgcgaaagaaaactttccgattaccggataccgcatccacgaagaaatgattaatgcgctcgccatcgtcaaaaaagcggcggcgcttgccaacatggatgtaaaacggctgtatgaaggaatcggaaatgcgattgtacaggccgcagatgaaattcttgagggaaaatggcatgaccaatttatcgtcgatccgatccaagggggagccggaacgtccatgaacatgaatgccaatgaagtaatcggcaacagggctcttgaaatcatggggcataaaaaaggtgaatacattcacctcagcccgaacacacacgtcaacatgtcacaatcgacgaacgacgtgtttccgacggcaatccatatttcaaccttgaaacttttggataagctccttgatacgatggcgcatatgctcagtgtctttaaagataaagcgaaacaatttgattctgtcattaaaatggggcgcacacaccttcaggacgctgtgccgatccgtctcggacaggaatttgaagcatacagccgcgtgcttgagcgtgacataaagcgaattaaacaatcccgccagcatctgtatgaagtaaacatgggggcaacggccgtaggtacgggacttaacgccgatccgcgctacatagaacaggttgtgaagcacctggctgacatcagcggactgccgcttgtcggcgccggccatttggttgacgccacacaaaacactgatgcgtatacggaagtttcagccgcgttgaaagtatgcatgatgaacatgtcgaaaatcgccaacgatctgcgcttaatggcttcaggtccgcgcgcgggacttgcggaaatttcattgcccgcccgtcagccgggatcatctattatgcctgggaaagtcaaccctgtaatggcagagctgatcaaccaaatcgccttccaggtcatcgggaatgacaatacgatctgcctcgcttcagaagcgggccagctggagcttaacgtaatggagccggtactcgtatttaacctgcttcaatccatcagcatcatgaataacgggttccgttcatttaccgatcattgtctggcgggaattgaagccaacgaaaaacgtctgaagcaatacgtggaaaaaagcgtcggcgtcattacagcggtcaatccgcaccttgggtatgaagcggctgcgcgaattgcccgtgaagcaatcatgacggggcaatctgtaagagatctctgccttcaaaatgatgtactgacagaagaagaattggatatcattttgaatccgtatgaaatgacaaaaccggggattgccggaaaagaactattagaaaaataaattttaaagcaacaacagccgccttttcacgttttttagtgaataggcggttgccatacaaagggatgaggcagtatagtataatttgttatatcatttgatgaaagcgttttagcttttttcttctagggggattttcttgtgaaagaggccagattgccaaatttattggaaattattatcttattattcgggtttttagcacttgtcttatcgttcacagtgtttttagacctgccgatccagctagctctattaatatcctggtttttcgctattattctcggagtcaggctgggatattcatataaagacttgcaggcttcgattgtcaccgggatatcaaacggtcttgaagcggtattgattctcgtttcggtcggtgcgctcatcgggacatggattgccggcggcgttgtgccgacgttaatttattatggtttagagtttattaatcctcatattttccttctggctacactggttatttgttccgttatgtccgttgcgaccggaacgtcgtggggaaccgtgggaaccgcagggatcgccatgattgccatcggagagggaatgggtataccgcttccgatcgtagcgggagccgttttgtccggggcttacttcggagacaagctttcaccgctgtctgacagtacggtgcttgcctccacgctttctaaggtggatgtgctgtcacacgtcagagcgatgatgtatctgtcaattccgtcctatattattacggccattctgtttaccgtaacgggatttatatacggcggaaaaaatattgatctcgacaaagtggaatttttaaaatcttcattgcagaaaacgtttgacattcatatatggatgctcattccggctgttgtcgtcgttgtccttctgattttgaaaaagccgtctatgcccgttatcatcatcggtgctttgcttggcgcaatctgggcttccgtctttcagggaatgaattttgccagtgccatcgcgactgcttataatggtttttctattaaaacggacgtcgaatttttaaacggcctgttaaaccgcggaggcattaccggtatgctggatacgttagtcgttatcctgttcggtctcggttttggaggaattctcgagaagctcggcgtattaaaagtgattgtctcaacttttgagaaaaagctgaccacaccgggaaatgtaacgctttcgacattgatcgtcgcccttttaggaaacattttcggctgtgcgatgtacgtgtcattgatcctgacgccgaaaatcatggagaacagttatgataaactgaaacttgacagaagagttttatcccggaacgcagaggtgggcggcacgcttacttcagggatggtgccgtggtctgataacggcatctatatggccggcattctcggcgtatccacattttcttatctgccgttcatgtggctcagttttgtatctatcggactggcaatattgtacggatacacggggaaattcatttggtacacgaaagaaaaatccttgcaatctcaaaaattgggttaggaggttcatttcatgattacaaagcatatgattcggacgttaatgattgaaacgccgactgttcccggaaatctcggaaaagtggcaaccgccatcggagtgatgggcggagatatcggggaagttgaaaccgttaaagtcggcccgaactacacaatgcgcaacatcacggtgcaggccgaaaatgaagagcagctgcaggaaatcattcaagccattgaagctctcggtgaaggcatccggcttcatacagtctcagatgaagtgctctctgctcatgaaggcggcaaaattcagatgaaaagcaaaatgccgatccggacactggctgagcttggccgtgtttatacgccgggcgtcgccgatgtgtgcagactgattgaaaacgagcctgaaaaagcgtccatctatacgacaatcagcaattctgtcgccattgtcaccgacggaacggcgattctcggcctcggcaatatcggctctgtcgccggaatgcccgtaatggaagggaaagccgcgctttttgaccagctggcgggtatcagcggaattccgattttgctcgatacctctgatccggaagaaatcattcgcacggtaaaacatatttccccggggttcagcggaattctgcttgaagatatcggttcgccccactgctttgacattgaagaccgcctgaaagaagaactggacattccggttatgcacgatgaccagcacggcacggcggtcgtcacgctcgccgccgccatttccgcttgtaaaagcgccggtcttgatttaaaagaagcgaaggtcggtcagatcggtctcggcgcggcaggcgtcgccatctgccgcatgtttatggcatacggagtcaaagcggtctgcggaacggacaagtcagaagacgcaatgaaccgcctcgctcagtacggaggtcagccgcttggaagcatcaaagaattaatggacacgtgtgacattgtgatcagcaccacaggagttccgggtctcattaaaaaagaggatgtcagaaaaggacacgtcattctggctttatctaatccgaagccggagattgaaccggaagaggcattacaagccggagccgcttatgcagctgacggccgttcggtcaataatgttctcggcttcccggggattttccgcggcgcgctgaacgccaaaagcaagaaaatcgaccatgaaatgcttgtggcggccgcagaagccatcgcctcttgcacgaaacacggcgatctcgtgcctcagcctttggatgcggacgtgcatcaagccgtatcagcagccgtagaacgggccgcggcagggaaataaacaactcttacagtaccggacatgtgccggtgctgtttttttatcatgaataggaagcggaattcttaggcaggctaacagatagcaaaagacggaataaagaggtgtcgatgtggattattttccgctgatccatacaaatatttgggatgctgtgatcggcgtgccggtcgtcttatgcgtcacacagctgatcaaagtgttctgccgggttccgggcatattcgttcccacgattgcccttgctgccggaaatgttgtgtctatcgttttcggtcatcatgaacacgtgtatgcggggatttttatggggtttttttacggatacgccgcaatggggagctattcatctgccaaaacgtctctgcgcgcttaccggtcgaaacatgagccgtattcatgaacacatctgaatttttttgttatgataaagaaaagggaaaaaggagcggttggcacatggcgaagagcaaaacgaaaaaaatgcgggagcatctcaaaagaaacgggatgcgtgacgcagtcctgtcaagggggacggcgccgtctttcagcacccatgaaagagtgacgaagaccaaaaaagacaggcttgaaagaataaagcataaaaaaaggaacccctatgatcacgggagtgatgacgggggttctttttttatgcccgaatctcgcgcctttctatgatttctctgtcatgttttctcttttctttcatacaatctactaaatcaagtcaatagattagcgggaggaaagcggtatgagaaaacaatcgtacaaagaactgttttttcgccatgtaaaggatcatctgtcactttatatatttgtgttcgtcttgtttttgatgggggtcattttcggggcgatcatcgtcaacagcatgaccatcacgcagaaagaagatttgtattactatttaagcaagtttttcggacagctgtctgacggaaaacatgccggcgcttcagaaatgttttggcaggccgtctttcatgatgtgaaatatttggggctgatgtggattctcggtatttccgtgatcggtcttccggttattttcattatggtgttcttaaaaggaatcgtggtcggcttcacggtcggttttttagtgaatcaaatggggatgaacgggtttttcctgtcatttatttcggttctgccgcaaaacatcgttctcattccggcgtatcttatcatggggacatgctccatcgctttttcactgaaactgatccggcagctgtttgtcaaacgcagccttcatgacgcgccgatccaatggttcggacgttacgccttcgtgctgattctcatcgttttcttctcggtcatcgcctcgctgctcgaggcgtacgtgtctccgctgtttatggaaaagctgtcatcacgcatattttagaattattatcacaaaataatacttttatttatcagtttataataattatagttggaactctgcgcgtattttgttataatgagtcatggaatgcggcgtaggagggaaagacatggaaaaccgtattgatcgaattaaaaagcagctgcactcgtcaagctacaagcttacgccacagcgggaagcaacggtaagagtgctgcttgaaaacgaagaagaccatttaagcgcagaagatgtatacctcctcgtaaaagagaaatctcctgaaattggtctcgctacagtataccgtacattagaattattaacagaattaaaagtcgttgataaaattaacttcggggacggcgtatcccgctacgaccttcgcaaagaaggcgcggctcactttcatcaccatttggtgtgcatggagtgcggagccgtcgatgaaattgaagaagatctgcttgaagacgttgaagaagtgattgaacgtgattggaaatttaaaattaaagatcatagattgacttttcacggaatctgccaccgctgccgcggggatgaaacagagtaaaagcctacgaaccttttctgccaggaaagggttttttgctgtttttatgtataaaagcctttgaaattggcataaggtgtactaacagccgccaaaagaaagggtcgatcgaaagatgggcagattcataaaaacagccgcggatacgatcaaagtgtttattctgttcacaggttttaccgcgctgttctattatgctatgatatgggtgaattcagagtatgaaaactatcatcggtacgataaaccggaaggctccgccgtcaaagtggccaaaacggaacatgaggagaaagacggctggttcggccgattgatctttttttaccaaaacggggagtagatcaagagtgaaggatcaaattaaggatttcatccattatgtgagggttgaaagagggctgtcccaaaatacgatgatgtcctatgagcgtgatctgaaaagttattctctcttcttaactgaaagccttcagatcacttcatggaatgatgtgacccgtcttcatattattcaatatttaaagcatataaaggactccgggaaatccggcaagacgtctgccaggcatttggcgtcaatccggtcttttcatcaatttctgttaagggaaaaagccgcggataaagatccttcggtacatattgaaacacaaaaaacagagcggacgcttccgaaagtattggcgcttcatgaagttgagcggttattggacacgcctaagcttgacagcccgttcggcctcagggataaagccatgcttgaactgctgtacgcaaccggcatcagggtcagcgagatgatcgagctgaaattatccgacgtccatttgacgatgggatttgtccgctgcttcgggaaagggcggaaagagcggattgtgccgattggtgaagccgcttctcatgcgatagaagcatacattgaaaaagccagagggaaattattaaagaaaaatgtaaccgaagcgctttttctgaatcatcacggcaggcagatcagccgtcaaggtttttggaaaaacctaaaaaaaatcgcacttgaagcggggattaaaaaagagctgacaccgcacacgctccggcactcctttgcaacgcacctgctcgaaaacggggcggatctgcgcgccgtgcaggagatgctcggacatgccgatatttccacaacgcaaatttatacgcatgtgacgaaaacaaggctgaaggacgtgtacaaacagtatcatccgcgcgcttaggagccgctgccagaggggccgcggcttttttgccggattggcggaatacagagaaggttctaattatttgaatcggcattgtcaacaagaatgtaaacggtttatacttgagttgtctgacctctgtaagctacaatggacagatggaagaaaaggaggtttttatgatgtctgaatacaaatataaccgggtatttttgatcgtaatggattctgtcggaatcggcgaagcgccggacgccgccgattttaatgatataggcgcaaatacgctcggacacatcgcagagcacatgaacggcttacatatgccccatatggcgcagctcggtctcggactgatcggagacattaagggcgtggaaaaaacggagcaccctcttgcgtactacggaaaaatgcaggaggcgtcaaacgggaaagatacgatgacggggcactgggagattatgggcctctacattgaaaaaccgtttaaagtgttccctgaaggatttccggatgaacttcttcaggaacttgagcggcgttcaggacggaaaatcatcggaaataagccggcttcaggcacggcgattctggacgagctcggaaaagaacatatggaaacgggtgcgctgatcgtttatacatcagcagattccgtactgcagattgcggctcacgaagatgtcgttccgctggacgaactgtacagcatctgtgaaacggccagagaactgacgcttgatccgaagtacatggtcggccggattatcgcaagaccgttcgtcggagaaccgggcagcttcaaacgcacgccgaaccgtcatgattatgcgctcaaaccgttcggccgcacggtaatgaacggaatgaaagacagcggattagacgtcatttccatcggcaaaatttctgatatttatgacggagaaggcattacatcttcccgccggacggtatctaatatggacggcatggacaaagtgattgaaacgctcggtgaagagttcacgggcctgagctttgccaacctcgttgattttgacgcgctgtacggacaccgccgcgatccggaagggtacggaaaagcgctcgaggaattcgacgcgaggcttccggaagtgtttgagaaaatgaaagaagacgatctgcttatcatcactgcggatcacggcaatgatcctgtccatcacggcacggatcacacgcgggagtatgtgccgcttcttgtgtacagcaaaaagcacaaacacactgaacagctgccgcttgcggatacatttgccgatatcggcgcaaccattgcggataatttcaaaacggaaaagccgaaatacggaaaaagctttttatcaagattacagtagggggactttttttgaaacaaaagatcgaacgtgctgctgcatttattaaagaacacgtgaaagaaacaccaaagatcggtctgattttagggtcagggctcggcgtattggccgatgaaattggaggagctgtcaagcttacatatgaaacgatccctgattttccggtctcaacggtagaaggccatgccggccagcttgtgatgggaacgcttgaaggtgtgcaggtcatcgcgatgcagggccgctttcattactatgaaggctactcaatggatcaggtcacatttcccgtccgcgtgatgaaggcgctcggcgttgaatctctcgtcgtgacgaatgcagccggcggtatcaacactgaattccgcgccggcgatctgatgattattacagaccacatcaactttacgggcaccaacccgttaatcgggccgaacgaagctgaattcggaccgagattcccggacatgtcagaagcctatgacaaagagctgtcaggcttggctgaaaaaacggccgatgagctgggcattcctgttcaaaaaggggtgtatacagctgttacggggccgtcttacgaaacgcctgctgaggttcggtttttaagaacgatgggttctgacgctgtcggcatgtcgaccgtgccggaagtcatcgtcgccaaccacgcggggatgcgcgtgctcggcatctcatgcatttccaacgcggcggcaggtattcttgaccagccgttatcccatgaagaagtaatggaaatgacggaaaaagtaaaaggcggctttttgaagcttgtaaaagccgtagtcgcacgatctcaaaaataagtcagcataagtcagctgtttcttcggaagcagctgtttttttgtgccctcaacacgaaacattttccagatgaggcgtataaaaccaccggatttggaaaaaataaaaaggattatgaaatggagggctttggagatgaaacgtcttatatccactttgttgattggcattttattaacggcatcagcaccgtccgcttttgcaaagccggacggaaaacatacatcggagctcgctcatgaagccaaaagcgccgtgctgattgaacgcgatacgggaagcattctttataacaagaacagtcgggagcgtctggcgccggcaagcatgacaaaaatcatgaccatgcttttaatcatggaagcgcttgacaaagggaaaataaagatgagcgataaagtcaggacgagtgaacatgccgcgtccatgggcggatcacagattttccttgaacccggagaagaaatgacggtaaaagaaatgctcaaaggaattgcgatagcttccggaaatgacgcatccgtcgcaatggcggagtatattgccggttcagaagaggatttcgtcagccggatgaacaaaaaagcaaaagaattgggattgaaagatacctccttcaaaaacccgacaggactgcctgaaaaagaccattacagctctgcttatgacatggcgaaaatggcgaaggaattattgaagtatgataaaatcactcaatttacgggaacgtatgaagattatttaagagaaaacacagacaaaaagttctggctcgtcaatacaaaccggctgatcaaattttatccgggtgtagacggcgtgaagacgggctttacaggcgaagcgaagtattgtttaaccgccaccgctaaaaaaggaaatatgagggtcattgctgttgttttcggagccagcactccgaaagaaagaaatgcccaagtgaccaaaatgcttgattacgccttcagccagttcaaaacacacccgctgtacaaacgggatcaaatcgtcggaacggtaaaagtgaaaaaaggaaaacagaaactgatcaagctgaccacatctgagccgatttctcttctggccaaaaagggagagaacatggacaaagtaaaaaaagaagtgaaaatcaacggcaatgtaacggctccggttaaaaaaggagaggtgctcggcagcctcgttctgaaaaaagacggaaaggtgctcgttgaaagcccggtcacggcaaaagacgacatggaaaaagcgggttttctcacttttctgaagcggacgatgggagattggactaaatttaaataatcgtggcgaacgggcactagttttgtcatagtgaaggaattgctttcccgaaaatcgaaacactcattatccgatcatatcaaggaggaatgagcatgagccttggaattgactttcatgtcaaagaatccgtgctttgtattcgattaacaggtgaactcgaccatcatacggcagaatcattaaaacaaaaggttactgaatcgctggaggctgacggcatccgtcacattgtgctgaaccttgaagatcttaccttcatggacagctccggcctcggcgtgattttagggcgttataaacaaattaaacagctcggcggagaaatggtcgtgtgcgcgatttcacccgcggtgagacgtctgtttgacatgtccggcctgtttaaaatcatcaggttcgaacaatcagaacaaaaagcgcttttaacgttgggggtggcatcatgaaaaacgagatgcatcttgaattttcagccctcagtcagaacgaatcgtttgcgcgcgtaacagttgcttcttttatcgcacagctcgacccgacgatggatgagctgacggaaatcaagaccgtcgtatcagaagcggtaacaaacgcgatcatccacggctatgaagaaaactgcgacggaaaggtgtacatctccgttacgctggaggatcatgtcgtctatctgaccatacgtgacgaaggcctcgggatcacggatcttgaggaagcgcgccagccgctatttacgacaaaacccgagcttgaacgctccggaatgggctttaccattatggaaaacttcatggatgatgtcacgattgattcctcgccggagatgggaacgacgatacgcttaacaaaacacctatcaaaaagcaaagcgctttgtaattaaggagatttgttatggatgtggaggttaagaaaaacagcaaaaacgcgcagctcaaggaccatgaagtcaaagaattaatcaaaaagagccaagagggcgaccagcaggcaagagacctcctcatagaaaaaaacatgcgtcttgtgtggtccgtcgttcaaaggttcttaaacagaggctatgagccggatgatctgtttcagatcggctgtatcggattgttaaaatccgttgataaattcgatttgtcctatgatgtccgtttttcaacttatgccgtgccgatgattatcggagaaatccagcgcttcatccgcgatgacggaaccgtcaaagtatcaagatctttaaaagagctcggcaataaaatacgccgggcgaaagatgaactgtcaaaaacatacggaagagtgccgaccgtccaggaaatcgcggaccatttagaaattgatgcggaggatgtggtgcttgcgcaggaagcggtgcgggcgccttcatccattcatgagaccgtgtatgaaaatgacggggacccgatcaccctgcttgatcagatcgccgatcattcagaagagaagtggtttgacaaaatcgccctcaaggaagcgatcagtgatttggaagaacgggaaaaactcattgtctatctgagatattataaagatcagacacagtcggaagtagccgaacggctcgggatttcccaagtccaggtatcgaggctggagaaaaaaatattaaagcagattaaagtgcagatggatcatacggaaagctgaccttttacgggccggctttttttatttgtgcatcggtggtaatttatggtcttttgccgctgatgaatgagaacaaaagtgaaccgcatactacatatataaccacccgaaagatggtgatgcaagatggaaagacgaatatttctcagacttcgccaccgcgtgaaggctcataccggagatatcatcacaatcggcgacgccgcgcagatcgcgggacagcaaaagctgaaaaaaaaactgtcggcactgccgctgtataaggtcacgaaaaaagacaaaaatatcgtcgtgctggacatcataaaagtgctgaaaaccattcataccgcttttcccgctcttgatgtacagaccgtcggcggcgctgaaacgatagtggaaatccattaccagaaaaagcagctgtcagccgttttgttcgtcggtgtctggctcctgctttttatcggttcatgtcttgccattatgaattttcatgaagatgtcagtatgagagaagttcatatcgccttatatgaaatcataacgggcgaacggaatgaatatccgtatctgcttcagattccatacagcatcggcctcggtctcggtatgatcgtcttttttaatcacatcttcaaaaaacgcctgaatgaagagccaagcccgctggaagtcgagatgtttaattatcagcttgatctcgatcattatgtcgcaatgcacgaaaatgaagagacgatgaaagatctgcatgatcgttagcattcttttcgttatgtttgtcgggcttggcggagggctgaccgtgggagcgggctttgtggcttttttaaccgttatgggaatcatcccccgccttatgcagctgacaaaaacaatgcgctttgtacaggcctacgaaggagctgttatttcaggagctgtgttcggcggctgggaaaccttaaatatgaatcatttttttttatctgaatggctggccgttccggtcgggcttttggccggcatgtttgtcggcatgctggccgccgcgcttacagaagtgctgaatgtgcttcccattcttgccaaacggatcggcttcggcagcaaaatcatcatattgctgatggccattgtgttcggcaaaatagccggctctttatttcattggctgtattttatccatcattcataaggaggaaccgacatgacaaacttaaaagaaaattacaaaacaaaagtgaaagactatcagccgaaaccgccatatgtttggaattgcgtcaaagcctttctgatcggcggtttgatctgtctgatcgggcaggctcttcaagacttttacatccacttttttaattttaatgaaaaaacagcgggcaacccgacggccgccactcttattttaatttccgcccttttgaccggattcggcatttatgacagactcgggcagtttgccggagcgggttcagccgtgccggtgacgggttttgcaaacagtatgacaagcgccgctctggaacacagaagtgaaggactcgtgctcggagtagcgacaaacatgtttaaattggcgggaaacgtcattgtattcggcgtcgtggcagcctatatcgtaggcctgatacggtttgcttgtgaaaaactgttttcgtaggaggagaaaaaatgaaattgaccggaaagcaaacctgggtgtttgaaaacccgttatttgtaaatgcggcggggacggcagccggaccgaaagaaaaagacggcccgctcggttcgctgtttgataagacatacgatgaaatgcattgcaatcagaaaaactgggaaatggcggaacgtcagttaatggaagatgccatcaactccgctttgcaaaaacagaacttgaaaaagagcgatattgatttgttactcgcgggggatcttttaaatcaaaatgtgaccgccaactacgtcgccagacatctgaaaattccgttcctctgtctgttcggcgcctgttcgacatcaatggaaacgattgccgtcgcatccgcgctcattgacggcggttttgcgaaccgggcgatcgcagccacgagcagccataacgcgacggcagaacggcaattccgcaatccgacggagtatggcgggcaaaaaccggataccgccacttcaacggttacggggggcggggcggtcatcatcagccaaaacccttctgatatcaagattacaagcgcaacagtgggaaaagtaagcgaccttggaataacagatccgtccgatatgggatccgccatggcgcccgctgccgccgacacaatcaaacagcacctgcaggacttaaaccgcacggcggatgattatgatctgattttaacgggagacctttcaggcgtcggctcgccgatcgtgaaagatttgctcaaagaagaaggctatcccgtgggaacgaaacacgatgactgcggtcttctcatctatacgccggaccagcaggtgtttgcgggcggaagcggctgcgcctgctccgcgcttgttacgtacacacatatttttaaccaattaaaagcggggactctaaacagggtactcgttgtcgcgacaggagcgcttttgagtccgacaatgatccagcagaaggaaaccattccgaccatcgcgcacggtgtggtatttgagcgggcgggaggtgcatcataaatggaatatctgttggcttttgtttgcgggggaatcatatgcattatcggtcagctgctgcttgacatttttaaactgacacccgcccatgtgatgacaacttttgtcgtcatcggcgccttgttagatgggttcggaatatatgacaaatttatcgaattcgcgggtgcgggcgcgacggttcccatcgtcagcttcggtcacagcttattgcacggcgccatgcatcaagctcacgagcatggatttatcgggatcgccatggggatttttgaacttacttccgccggtatatcttcagcgattttattcgcatttcttgtagccgttatttttaaaccgaaaggataatgcctgatgacgaaacggaaggtcattcttgtgacagacggggacgtatacgccgccaaaacaattgaatatgccgcggaaaaagcaggcggacggtgtatttcccaatcaaaaggcaatccgtcaacgagaagcggccccgaacttgttcagctgattaaagccgcgccgaatgacccggtgtttgtcatgtttgacgattcaggcctgcaaggggaagggccgggcgaaacggcgctgaaatatgtcgcctcacatcaggacattgaagtgctgggggtgattgcggtcgcttctaagacccatcaggctgaatggacgaaagtcgatgtctccattgaccgtgatggagaagtgacggagtttggcgtcgataaaaccggaatgagagaaatggacgagcacagaatgaacggagatacggtgtattgtctggataaattggacgttcccctcattgtgggcatcggcgacataggaaagatggggagaaaagatgacatatccaaaggctcgccgatcacgatgaaggcggtcgaattcattttagaaaggagcgaaagccatgccggaaaaaccggaaaacatgatcaaggtgtaccgggatcctagaaaaaatgaacaattttttaaagaccgcgtcggtatgggaacgagctatgatgtcggcgtccgcaaagttcgagtattagaccgggaagtccagatttactttgtcaacggattaaccgatactttgtttatcattcatttaatggaacagctcgtcgacgtcaataattatgacgagaatgcggatgaagcgattgacgttgttgaaaacaggcttgtcaatcagcaggtccaaaaagtcaaaacgctcgacgaagcaacggatcaagtgctttccggacttgtggcggttatcgttgaagacgcaggcttcgcctttatcgttgacgtcagaagttatcccggacgcacacctgaagaaccggatacggaaaaggtcgtccgcggtgcaagagacggttttattgaaaatatcgtcattaatacagcattgatcagaagacgaatcagggacgaaaggctccgcgtcaaaattacgaaagtcggcgagcgctctaagaccgatcttgcgattgtgtatatagaggacatcgcggacccggaccttgtcagcatcgtcgaaaacgaagtgaatgcgattgacattgacggactgacgatggctgataaaacggtggaggaattcatcgtcaaacaaggctacaatccgtttccgatggtcagatacacggagcggccggatgtggccgccaatcacattttggaagggcacgtcatcatcgtcgtcgatacgtcaccgagcgtgatcataacgccgacaacaatatttcaccatgttcagcatgcggaagaatacaggcaggcgccttcagtgggcacatttttaagatggatcaggtttttcggtattatcgcttcaaccgttctgcttccgatctggttcctctttgttctcgagccgtctcttctgcctgaaagattggattttatcggtttaaataaaaatacgcatatcccgatcattctgcaaatctttttggccgatttggggattgagtttctcaggatggccgcgatccatacgccgaccgctttatccaccgccatgggtctgattgcggcggtgctgatcggtcaaatcgccatagcggtggggctgttttcagcagaagtgattctgtacgtatcgatcgccgccatcggatcatttaccacgccgagctatgagctcagcctcgccaataaaatgatacgcctcatcttaatggtgctcgtggccattttccaagtgaaaggctttgtgataggttttacattgctgctgatcataatggcgaatatccgctcgtttcacacaccgtatttatggccgtttttaccgtttaacggcaaggcgctgtggcaggtgctcgtccggacgacagtgccgggagccaaagtcagaccgagcattgttcacccgaaagaccgtcaaagacagccaagcggttcataatcgcattgaaaccgacagaagattatgatattgtatgtcttaacttatacgggacttgtataaggacagctcaaaagaagctgtccttttcacccatatgcggatcagaaagagggaatgagcattgttcttacatggcacaagcagacaaaacaaactaggtcatttggaaatcggaggtgtggacgcgctgtatttagcggagcattacggcacgcctctttatgtttacgatgtggctttaatacgtgagcgcgctaaaagctttaaacaggcattcattgacgcggatttaaaggcgcaggtcgcgtacgcgagcaaggcgttttcttccgttgcgatgatacagctcgctgagcaggaggggctctcattggacgttgtatccggcggagagctgtttacggcggttgcggctggttttccggctgacaggattcactttcacggcaataacaaaagcgaagaagagttgaaaatggcgctcgatcatcaaatcggctgcattgtcgttgataatttttatgaaatatccttactcgcggaactgtgccgcaaatcagggcgcacaatggatgtgcttctgcggatcactccgggggtagaggcgcatacgcatgattatattacgacgggacaggaagattccaaattcggttttgatctgcataacgggcaaatagaaaaggcgattgaacaagtattacagtcagaccatatccgccttctcggcgttcactgccacatcggatcgcaaatttttgatacggcgggctttgtgctggccgcagaaaaaatcttcgcaaaactgaatgaatggagagaatcattcggctttgtctctgaagtgctgaatttagggggcggcttcggcatccgctacacggaggaggatgaaccccttcatcccgccgtttatgtggaaaaaattatcgaagcggtaaaagaaaacgcagcgctgcacgcttttgacattccggagatctggattgaaccgggacgctcgctcgtcggagacgccggaacgacgctttataccatcggttcgcaaaaagaagtgcccggcacccgtaaatatgcagcggttgacgggggcatgagcgataatatccgtcctgcgctgtatcaggcgaaatatgaagccgtatcggcaaacagaatcggagaacaccacgataaaacggtatccatcgcgggtaagtgctgtgaaagcggtgatatgctcatttgggatatagatcttccggaagtgaaagaaggcgatcttctcgccgttttctgcacgggagcatacggatacagcatggctaacaactacaaccgcattccgcgtcccgccgtcgtttttgtggaagacggcgaagcgcatcttgtcattagaagggaaacttatgaagacattgtaaaactggatctgccgtttaagacgggggtcaaacaataaataaaaaagagaccggaacaatggcgtccggtctctttttgcattcagctgttagaacttgatccgctgtctcctgtaaatacagacacgatcgcattccaaatcgaagcgaagaaatcaatgactttttgaacaaagcttttgccttcatcggattgaatgaacttcgtgattttgtcttttgccttgtcaagctggctgccgacttggccccaatcaatcttggcatttttcattttattaaacaatgaaacgagctggtctttttgagcgtcagtcagtgtaatgttaaggtttgaagccgcatcatcgacctttttctcgattccttcttttgtatcgggcacaccgtttttcgcgaaatcatctttaatgtttgcgatgagcgcggaggcgtttttatccccgattttatccccgagatttgaagtggtgacaagctcttggttggcgacctgttttacatcttctgaaatcgctttgtctgatgagacttcatatgccttgatgattcccgttaatgctgcggtgcctgatacctcaaacggcgccgtcacgtatactttcgcatctttcactcctgctgtcatcagggcgtttaagtacatttcatccgtgatggaatcgatattatgggtcttaacgtcaagcccggaccctttctttgccaccgtgatggatgatgaagagatggctcttgtgccgatttgggcattcgatatatattttcccagatattcatgttcttctttattcgtgaccgtcacttttgtcgcgttatcagggacatttaattcgtcaagcactttctgacggttttcgtttgacagatccgcccccagtgtgacgatgacatctccgactgcggcatcggccaggctgattttcggtattgtgcacaatacaacggccgccgccagcaatccaatccacatttttttcaaagcggttaacctccttcttttcacaaaagccgttttgaagcggtttgtgagggcctgcgtgaagcagttccgatacatagacggctgtgaagctgttctggtttcattttctttctgtggaagcggggagattcgttttccggctgaaggtgtggtataatagccgcgaaaagaagagcagaagcctcttccttcaaaagaatatcaaaaagaaagccggcttacaattgaaattcatattgaagaaggctttgacaaaaaacaatatggaagtaggaatgagaatgaaaactggttacatcgaaatggaaaacggcagcagaattgaatttgaactttatccgaatgaagcgcctaatacagtcgctaactttgaaaacctggcgaatacgggcttttatgacggcgttattttccaccgcgtgattccgggctttgtcagccaaggcggagatccgactgggacaggcatgggcggaagcggaaaaacgatcaaatgtgaaacagaaggcaatccgcataagcacgaagccggttctttatcaatggcgcatgccggtaaagacacgggttcaagccaattcttcatcgtacatgagccgcagccgcatttaaacggcgttcatactgtattcggaaaagtgacaagcggtttagagcatgcgaaaaacatgtctaacggagacaaaatgaaagaaatccgtgtagaaggataatgacggaaaacccgcctttttcaggcgggtttttttatgtatatgaaaattctcatgtgtaaatcatgaaaaaatacatatatgaacattagtgatcattctggtatagtgaaaaagaccgagtacaacaatgaaaagaggtagaaacgttggttcaattggcaaccgttttatttgtcattatcattctcgcacttatgatttggttcagggtgaaaaagggaaacaggccgattaaaggcggcggcttcggcatcattctcccgcttttgattatcgccgtcatttttacattcagcatcagccagctcatgaatatcccgggaaagccgtttcattttcccgctctttgggagctcgccatcgccggactgttaggcgcggcattcggcgtcatcatgctgtcgcaaaccgcctatgaaatccgggaagacggctttgtctactccaagcggaataaaaactttaaatatgtcattatcgcgattattgcgatccgtatcgtgctcagccaatatttcaaaaacattgacgcggcggaattcgccgttttaacgatggaacttgcttttgtgtatttgtgcatttggcggatcggaagcttcgtgaaataccgtaaaatcagcaaatccggcttataaaatgaaaaaaatggatgaggtgcggggcttatttgccctctgtgcagggattcatggtaaaataaaaacgaccatggctaatgggaggaaatcacttgaaatcagaaaaagaaaaaacttctaaaaaaagcgccgtacttgattgggcgaaagccattatcatcgctgtcgttctggcactgctcatccgaaactttttatttgccccttatctcgttgatggaagatcaatggatccgacgctgcatgaccgcgagagaatctttgtcaatatgacggtcaaatacataagcgacttcaaacgcggccagatcgtcgttctgaacggagaaaacgagcactatgtcaaacggattatcggacttcccggcgacacggtgcaaatgaaaaacgatcagctgtacatcaacggcaaaaaagtgtccgaaccgtatttagcggcaaacaagcacaaggcgaagcaagacggctatgaccggctgacagaagacttcggcccggtgaaggtgccggacgacaaatatttcgtcatgggtgataaccgcagagaatctatggacagccgcaacggcctcggtctttttacgaaaaaacaaatagcgggcacatcaaaattcgtcttcttcccgtttaacgaaattcgcaagacgaaataaaccgtacaggcagttttcttcatgaggaaaactgctttttttatataaatttatctttccaccctcaaaaacagaacataaattcgtatatctatttaatagatagaaagttttacagatacatgaaacatcttccctttatgaaacgttatatgaataactcacgcagggaagaacggttttctattcatgaaaaaaaggaatatgacatagtaatgaatagattgatacgggctggaggtagaaaaatgggaagaattaaaacaaaagcagccattttacttgtactgctgctgttattagcgggcggttatatggtcataaacgatattgaactgaaagacgtgccgactgcaatcggacaaaccctgtcccaggaaaaagaagaatatacagtgaaaacatataaaattacgaaaatcgaaggaactgagtaccacggtacggcagaaaacggcacaaaaattatttttaacggcgacaagctgaagcaggatctctccgatgtgaaaaagggagataagattaaagcgtatttcagcaaatcaaaccggattgacggcttattgaaggtcgtcaaagtgaacgaataaataaaggcgccttttatgagaaaagggcgctttttatttttctgaataattaggtgcaaattcattgcgcctgccgcaaaggatgttataatagcggataaggacaaaaaaatattgattgtatccttcggggctgggtgaaaatcccgaccggcggtaataaggcgttttgcgctttacagcccgtgacccgtatgcatctgtatacggtggattcagtgaaaagctgaagccgacagtgaaagtctggatgggagaaggatgagagaagctatgcaaaaaataaacttactgtatagtcttatttcctatggattaaaactggcaaagccccgaactgtgtaaacattcggggcttttttgacgccaaattgcgtggaagaagggagggataacgatggaagaatattatatgaatacggcaatagaacttgccagacgcggtgaaggacagacacagtccaatcctcttgtcggcgctgtcgtcgtcaaaaacggacagatcgtcggaatgggcgcccatttgcaatacggagaagcccatgcagaagtgcacgcgatcaatatggcaggcagtcacgcaaaaggcgcagatatgtatgtgacgctggagccttgcagccattacggaaaaacaccgccatgcgccgaactgataataaagtcggggataaaaagggtgtttatcgctgtgaaagatccgaatccgcttgtagccggaaaaggcatcggaatgctggaagcagcgggcatcgaagtgaacaccggacttctcaggcagcaggcagaagagctgaataaaatgtttcttcacttcatgcggaccggacttccgtatgtcaccttgaaagcggccgcgagccttgacgggaaaacagcgactgaaaccggtgacagcaaatggattacatcagaggcggcaaggcttgatgcccagcaatacaggaaatcgcatcaaagcattcttgtcggagcaggcacagtcaaagccgataatccgagcctgacctgcaggcttcctgatgcggtgaagcagccggtcagagtgattctcgatacaaagctgaccattcctgaaacggcaaatgtgctcactgacggcgctgcgccgacatggatatttacggccaaaggtgcagacgtgcaaaagaaagaccggctgaccgcactcggaataaaagttattccgctggaaacagaccgcattcacgtccctgaggtgctcggtattctcgctgaaaacggcataatgtccgtttatgtggaaggcggagcatccgtacacggaagttttgtcaaggaaggctgtttccaagagcttcatttctatttcgcccctaaattaatcggaggaacgcttgctcccagcttgatctccggtgaaggttttcaatcaatgaaagatgtcccccatttacaattcacacaaatcacccaaatcgggccggatataaaactgacggccatacctaaagatggaaaggatggtgacgatgtttacaggaatcgttgaagaaacaggcacgatccaagcaatcaaaaagacaggcctttccatggcattaaccatcgccgcttcaaaagtgacaagtgacgtgaagcttggcgacagcattgcggtaaacggcatctgcctgaccgtaaccggattttctgacaatcaatttacggttgatgtcatgccggaaacagtgaaagccacttcgctgaacggcttgtcaaaaggcagtaaagtaaacctggaaagagcgatgtccgccaacggacggttcggcggccactttgtatcagggcacgtggacggaacggcggaaattacgcggatcgagaaaaaaagcaacgcggtctattacgatttaaaactttcgccggaattgacaaaaacgctcgtattgaaaggttcaattacggtagacggcgtgagcctgacgatttttggtttatcagacgaaagcgtgacggtatccatcattccgcataccatctcagaaacgatttttcagacgaaaacagtcggatcgatcgtaaatattgagtgtgacatgatcggcaaatacttataccgctttttgcacaaaacagaacaaacgaaaagcaatcaaactatcacggaagcctttttaagcgagaacggcttttagaaaggaagatcgatatgtttcatccgatagaagaggcgttagaggcgctgaaaaaaggtgaagtcatcattgttgtcgatgatgaagacagagaaaacgaaggagatttcgtagcgctggctgagcatgccacgccggaagtggtgaattttatggcgacccatgggagaggcctgatctgcacgccgctgtctgaagacatcgccggccggctggatcttcacccgatggtcgatcataatacggactcacatgagaccgcgtttacggtcagtattgaccacaggctgacaaaaacgggcatcagcgcgcaggaacgatcctttaccattcaggcgctgttgaacgaagaatctgtgtctgacgattttcagcgtccgggccacattttccccttaatcgcaaaaaaaggaggcgtcctgaagcgggccggccatacggaagcagccgttgaccttgcaaaagcctgcggatctcagggagcgggcgtcatttgtgaaattatgaatgaagacggcactatggccagagtgccggagttagccgaaatcgccgaacgccaccagctgaaaatgattacgataaaagacttaatagagtaccgttacaacattacgacccttgtgaacagagaagttgatattacgctgccgactgacttcggcacgtttagagtttacggatatacaaacgaggttgacggaaaagaacatctcgcctttgtcatgggggatgtcccgtttaacagcgaacccgttcttgtcagagtgcactcagaatgcctgacgggcgatgtgtttgcatcccatcgctgtgattgcggacctcagcttcatgccgcgcttgcgcaaattgctgaagaaggccgcggcgttctattgtatttgcgccaggaaggcagagggatcggtttaatcaataagctgaaggcgtaccgattgcaggaacaagggtatgacacggttgaagcgaacgaagcgctcggctttctgcctgatctgcgcaactacggcatcggcgcccagattctccgcgacttaggggttcagcatatgaaacttttaaccaataacccccggaaaatcgccggcctcgaaggatacggtctcagcatttcagaacgggtgccgcttcaaatggaagcgagtgagcataacaagcaatatttacagaccaaaatgaaaaaacttggacatctgcttcatttctaaaaacaaatctcacaaaaaaggatggataacatatgaatatcatacaaggaaacctagtaggaacaggacttaaaatcggaatcgtcgtcggcagatttaatgaatttattacgagcaagctgttaagcggagcggaagacacgttgcttcgccacggtgtagaatcaaacgacattgacgtcgcttgggtgccgggagcgtttgaaatcccgtttgcggcaaagaaaatggcggaaacgaaaaaatacgatgccgtcattacgctcggcacggttatcagaggagcgacaacgcattatgactatgtgtgcaatgaagcggcaaaaggcattgcccaggcgggaacggcgacgggcgtcccggttatcttcggcatcgtgacgactgaaaccattgagcaggccatcgaacgagccggaacaaaagccggaaataagggagcggattgcgcagtatctgccattgaaatggcaaatttaaaccgttcatttgaataatttgttgaaaagcgtttaaaacagcggcgaaaatgatataatgtgaggaaacggatcgcctttatgtatccgtttaataggacatgaatggacattttggatatagaggggtttttatgttaattcgttataaaaaatcgtttgaaaagattgcgatgggtcttctgtcatttatgccgaatgaaaaagatctcaagcagcttcagcagacaataaaggactatgaaacggatactggccgccagctctttctttggaaagaggatgaagatatcgtcggagcgatcggagtcgaaaaaaaggactcagaagttgaaatccggcatatcagcgtgaatccttctcaccgccatcaaggaatcggaaagcaaatgatggacgccttaaaacgtctgttcaaaacggaggcactcgttccgaatgaattaacgcaaagcttttttgaacgctgtcaacatcaaaaagatcaggatatctcatataataactgacaaatgctcccggaatcttcacggtttcgggagctgttttgatatagaaaaagcagggctgaccgtcagcctctgcttttttttcttctctcaatttcccgttcgcgttccttaatgacatccgtcctgtcccgcaggcggtgtttatgaataagaaaggtatctgatacgccgtcttgcccccatgtatagccctttcggcggcattcggcaagacatgcttctttcagggcttcatctgtaatcggcagcataacacttctgtaaggcacgcccgcttctatatcgtctgacagcgtttctatcagctcaatcagcttcggatggctgagaccgagagaacagaccgcctgcttttcagaccggagaatacgtaagctgttggcaatcagccgtttcgccccggcttcatttcccctgcgctggtgatacagagcgacggcaagctgaatcaggccgacccaatgaatgctccgcttttcagcggggctttctttccaatattcctctaacagttcatgacactcaaaataatctcttgatgcgtgaaattcggccaaaaagccgatataagctttaggatacaagccgcttcctccttttatgctaaaaccagtgtaccacagcgctatgaaaaggaaaaaagagcggcttggtgtctgaagcctgaggaactagcagatgtaagatgctcctacgacaacgagcaaaataaacagaacgacaattaatgcaaaacctccgccgaaacaagctccgctcatgtgaaatcagcctccctttgtttcaagtttacacggctatcatatgtgcatccgcctttaaaggtataggcgtatatcttctttttcagtattttctaaataacggagggtgtgtataaaagtattggacgagagcatttcggtggattatactaaagggtagccagtttttccggcaatgagagtgatattgaaaatggtgagataatggtagaatatcaagtgaaaattgatacgtttgaaggcccattggacctgctgcttcatctgattaaccgtcttgaaatcgacatatacgacatacccgtggcaaccattactgaacaatatttattatatgtacatacaatgcaagagcttgaacttgacgtcgccagtgaatatctggtcatggcggcgacgcttctcagcattaaaagcagaatgctgcttccgaaacaagaggaagagctgtttgaagacgaaatgcttgaagaagaagaccctcgggacgagctgattgaaaagctgattgagtatagaaagtataaaaccgctgcgaaggatttaaaagagcgggaagaagaaagacaaaagtcatttacaaagccgccgagtgatttaagtgagtatgcaaaagaaatcaaacagacggagcagaaactgtcggtgaccgtttatgacatgatcggcgcgtttcaaaaggtgcttcagcgtaaaaaaatcacgcggccgaaagaaacgaccattacaagacaggaaataccgattgaagacagaatgaacgaaatcgtaaaaagcttaaaaacggcggggagaagaataaacttcacggagctttttccttctcggcaaaaggaccatctcgtcgtgacgtttttagcagtcctggaactgatgaaaaatcagcagattatcattgaacaggaagaaaacttttcagatatatacattacggggagtgaatccattcatggcgcttgatatcgtgaattggaaagcgattgtggaagccctgctgtatgcggcgggtgatgaagggctgaccaaaaagcaattggtgacggtgcttgaaatagaagaagcggaactggccggaatcatggaagaagtggccgctcagtacaaggaagacgacagaggcatcgagcttaccgaatatgcggatacgtatatgcttggaacgaaaaaagaattcgtgccttatttgaaaaaactaatcgaagtgccgtcaaaagggctgtcacaggcttctttggaagtgctggcgatcgtttcgtacaagcagccgatcacacgggcggaaattgaagatatccggggcgtgaagtctgagcggattctgcacagcctcgtgtcaaaagcgctgctgtgtgaggtgggccgcgccgacggtcccggccgggcgattttatacggcacgacaccggtatttcttgaacaattcggcttaaaaacattggaggagctcccgccgcttcctgaaaatgcggaggaagacgttctccaggaggaagccgatttattctttgaaaacttcaaccaaacttttgaggatattaaataataatcgtttttcatcatacgatagtagggaaaggccattgatgaatgacgcaaatgacgacgtacaagagaggaaggaaacggacggaaatgggaaattcgattgtgagggcccatactgaagaaactggtgaatttttagccgaggttgtcacgatggtcagcagctatttaaatcatacaactttgccggagatgcgggctcaaggagaggcggatgaagcatactgccgcgacgtgctcagtgtgctgaggaggatgaccgtcttttgcgaaggcgcccaggaagcctgcaggcggcttttaatgcaggagccgtttcatgaggcgagagcggaaaaaacgctgtataaagtatatcatcagtgcgtggaagagtttttcatgccgaaaaaggatacatggtacgaaaacagccgcgccgcttatacaggccaaagcgcgattgaattctaccagcaagtgccggactcgctgcggagccttctgctttcgctcagcagtgaatttctgcgcatgcgggaagaattggcgcaatatgaagcatcaggctcaaatatggcatcagtcagataaaaactcttccttttgggagagtttttttatgtgaaagtgatgcaattggtattcataagtcatggacatgcgcataaacttgtacaaacccacaacaaggacgtgagcattcatgcgctttctcaaaaaagctgccgtatttcttttgacttttgttattcttttttccattacagacggcaatacggcacatgcccaaatacatgtcagcgcaaaaagcgcgattataatcgacggagcatctggcagggtgttattcgccaaggatgaacatcataagcggcggattgcaagcattacgaaaatcatgacggcggtgctggcgattgaatcagggaagatggaagagaccgtgacggtttccccgaatgccgtaaaaacggaaggctcagccatttatcttcagccgggacaaaaagtaaagctgaaagatctcgtatacgggcttatgttaaggtcaggaaatgacgccgctgcggcaatagcggaatatgtcggcggaagccttgacggttttgtatttatgatgaacaaaaaagccgagcaaatcgggatggaaaatacaaaatttcaaaatccgcacgggctggacgaccatgaaaatttatattcaacggcgtatgacatggcgcttttgactaaatacgcgatgaaaatcaaggaataccggaccgtttcaggcacaaaagtgtataaggcggaaacgatggaccgggtatggaaaaataaaaacaagcttctgaccgggctctaccgttacagcacaggcggaaaaacgggttacacaaaaatcgcgaaacggacgctcgtctcgacggcctcaaaagacggaacggatctcatcgcggtcactataaatgatccggatgattgggatgatcatatgaatatgtttaattatgtctttgatcactataaaacctatgtcgtcgccaaaaaaggcggcatcccgaagctgaaaaagacgttttacggaaagcgcgcttttattgcccgggatgtcaaatatttgttaaaagaggatgaaatcgacgatgtaaaaatccgcacaaccttaataaaaccgaaaaaagcctggaaaaaggacgcctctctcattcctgatgtcgtcggccggatgactgttatgcatgatgggaaagtgatcgccaagatccccgtctattatgaaaatgagcgccataaaaaaccgaaaaagcatttcattgagacgtttacgagcctgtttatgagcgcggcgggcggttcgtcatggtcaatttaatctgggtatgtctgacggtaatcggacttgtctttgcgatgtttaacggtaccttacaggatgtgaatgaagccgtttttaaaggagcgaaagaagcggttacgatctcgttcggattaatgagcgttctcgtgttctggctcggcctgatgaaaatagccgagcagtccggccttttggatatattcagcagaatgtgccgcccgtttatttctaagctgtttcccgatattccccctgatcatccggcgatgggatacatcttatcaaatctcatggcaaactttttcggactgggaaatgcggcgacaccgctcggcattaaagccatggagcagatgaaaaagctgaatggaggtaagtctgaggccagccgttccatgattacctttttggcggtaaatacttcgagtattacattgataccgacaaccgtcattgccgtgcgcatggcttactcggcgaaatcaccgaccgatatcgtcgggccgaccatcttagcgactttaatttcgggaatcggcgcgattttcattgaccgctacttctggtaccgccgcaaaagaaaagggaggtaagcgaatggaaatggtgaattggctgtctttagccatgattccgattattatcgccggtatattgatatacggcacgatcaaaaaagtgccgacgtatgaatcattcgttgaaggcggaaaagaaggaattgagattgcgttttccatcattccgtatttggtcgggatgctggtggcgattaccgtattccgggcctcgggcgcgctggattttgtcatggggctgtgcaagcctttctttacagcgatcggcattcccgcagaagtcgtgccgcttgctctgatccgcccgatttcggggacggcggcgctcggcatgacgacagatctgatcgccgtgtacgggcctgattcatttatcggcaggctggcctcggtcatgcagggatcgactgacacgacgctgtatgtcctgacggtgtatttcggggcggtcggcatcaaaaaaatgggggatgctttaaaggttggtcttcttgctgatttgatcggggtggttgcatcaatcatcatagttacgttattatttggaagcgcctgaaatcaggcgctttttatatatcagaataactctccttgaaaaagcttgtttgttcaaggggaaaaaagtaagattatacttgaggtgaacgacatggaaagactgcaaaaagttattgctcatgccggcgtggcatcacgcagaaaggcggaagagctgataaaagaaggaaaagtaaaggtgaatggaaaagtaataacagagctcggcgtaaaagtgaccggttctgatcagattgaagtaaacggattaaaggtggagcgggaagaacccgtgtactttctgctttataaaccgagaggagtgatctcagcagctgatgacgacaaagggcggaaagtggtgaccgactttttcaaagaagtgccgcagcgcatttatccgatcggcaggcttgattatgatacgagcggacttttattgctgacaaatgacggcgagtttgccaacaaactcatgcatccgaaatacgaaattgataagacgtacgtcgccaaagtgaaggggattccttccaaggaacttctgagaaagcttgagcgcggcattcagcttgaagaaggcaagacggcgccggccagagcgaaattgctttccctggacaaaagaaagcagacgagcatcattcagctgacgattcatgaaggacggaacagacaggtccgccgcatgttcgaggcgatcggtcatgacgtgctgaaactaaaacgtgaagaatacgcatttttagatttaagaggcctgcgcacaggagacgcaagagaattgtcgccgcatgaggtgaaaaggctgcgggctttagctgaacacggtaaaaacgctttctaattttcacataaccttcaaaaattacaaaacgtgttgatgatataattgaatggatttgcaggcaggggaggggagcagtgtacaatgaacaaaaaacggcggcgtttattcattcggaccggcatccttctcatcttactctgcgcgctcggatataccatctataatgccgtatacacaaacggtgagcgtatatctgaggggtccaaagccccgaatttcgcgctgaaagatacagagggcagactcatagaactgagtcagttaaaaggaaaaggtgtttttctgaatttctggggaacgtggtgtgagccgtgcaagcaggaatttccctacatggagaatcaatacaagcattttaaagacctcggtgtcgaggtggttgcggtaaatgtcggcgaatcaaaaattgcagtacataattttatgaaaacatacggcgtcaatttcccggttgcgctcgatactgaccggcaagtgctggacgcgtacggcgtatcacctattccgacgacatttttgatcaatcccgacggaaaagtcgtgaaagtggtgaccggcacgatgacagaacgcatggttcatgactatatgaatttaattaagccggaggcgtcttcatgaaaaaggtcaaatgtgaatgcgggcacgtgaatccagccgggacggttttgtgcgagtcgtgcgggaagccgcttgatgatcaaaaatcgccgcttgccgatatgcggtacgacggcagcgcaaggcgttcgcaaacatataacaaaacaatcgtagacaaggtatggaacttcttttcttccgtaaaagtcggaatatggctgatcgtcattactctggcggcgtctgctttcggcacggtttttccgcaggaagcttatctgccgccgggcgcccagccggatacatattatgaacagcagtacggcataatcggccaaatgtattatctgctgggatttcatcacctgtacggctcatggtggtatatgctcctgatcgcatctattggcatatcactggtcatctgcagcctggatcgggtgattcctttgtacagggcgctgaaaaatcaaggagttcggcggaatccggtctttttgaagaggcagcgtctatacagccggacagaaaccgagctgagcggggatgcggctgatagcatcagaacacgattgaaaaaaaagcattatagagtgcgagaacaagagggaagcattctggcggaaaaaggccgtttttcaagatgggggccctacgtcaatcatatcggcctgatcatttttctgatcggagccatgctgaggtttgtacccggtatgtatgtcgatgaaacgctctgggtccgtgaaggcgaaaccgcccagatccccggcactgacggcaagtattacttaaaaaacaaccggttcacgatgcagacatataacaaagacactgagaaaaaagtattcgccgacgccattgacagagccggaaacggcaaagtcgccaaatccttcacaacggacgcggttttgtacaagagggaaggcgacattgtattcggtgaaaagccgaagcttaaaagagtcaaagaaaacaatatccgcgtcaatgaaccgctgcgctttgactcctattctgtgtatcaggtggactataaagaaaaccagctcgatcagatggtatttcagctgatcgaccaaaaaacaaaacagtcattcggcaaactgaagatcaatcttctcgatcccgacacggactatgatcttggtaacggttacaaagtgcagatcgccagttatcttcctgatttttattttaacaaggacggagaaccgagcacgaaaacgaaggttcctaacaatccggcttttgtctttaaaatcacggctcctgacaagccgaaaggggagaaaagttttgttgcgattcagcagactgttgaaggttccgaaagtaacaagtacaaattaaaattcgaccatgtggaaacgaaaaacattacaggactcaccgtcagaaaagacttaaccttatgggtgcttgccgtcggcggcgcgatctttatgatcggcgtcattcaaggaatgtactggcagcacagaaggatctggatcaaaacaggtgatcatgaagtgcttgtggcgggacatacgaacaaaaactggttcggtctgaaaaaggatatcgaatttgttcttagcgggaccgggattcaagagccggccgatcaaaaagaattggccaaaaatcaggcctagtgaaaaaggagtggtgtcatggcggagctgagcgcaaattttctttatgctgcctttttgatttatttaattgccgtcccggttttcggcggcgccatccggggaacaaaaggtgctaaggacggtaagggccgctggtcggctatcggaatcacgttaaccattttcggatttctttgtcatctcggctacttcattgcgagatggtcggcaagcggacatgcgcctgtcagcaatatgtttgaatttacgacgtcattcggcatgatgcttgttctcgcttttattattatttactttatttacagactgccttcattaggcatgttcacattgtctatcgcgcttttgcttatcgcatatgcaagcatgtttccgacagacattacgccgcttattccgtcactgcagagcagttggctgtacattcacgtcacgacggcggcgctcgggcaggcgattcttgcgatcagttttgtagccggcgtcattttcctgttaaagcacgtcgaccaatccagaccgggcaaaaaaacgttctggctcgaagtcatcatgtttatactcgtgacgaccgtggcatttatcgccgtcacgtcggcattccggctggcggactacaaagctgaatttaattgggtggataaaaaagaagccaaaagcgtcatgatatatgatatgcctgcgcttgtcggcccgcatgagggagaactgcttacggaaggcgcaatgaagccgcttattgagcttccggccattttttcaggcagaaaggtcaatacggtgatctggtcgtttggcgcaggtctcgttttatacggtgcgctcaggctgatatttagaaagagaatcagcgctcttatcagcccgctcgtcaaaaatgtgaatctggacttggtcgatgaagtcggctaccgcgctgtttccatcggttttccggtattcacactcggcgcgcttgtgtttgcgatgatttgggcgcagcttgcatggacgcgtttttggggctgggacccgaaggaagtatgggcgctgatcacctttttattttacgcagcgtatttgcacttgcggctgtcaagaggctggcatggcgaaaagtccgcgtggcttgccgttatcggcttcgccattattatgtttaacttaatttttgtgaatctcgtgcttgccggacttcattcgtacgcatagatgcaaaaagccgatacagttctcaagctgccgcacagtttgttaaaatgaaagtaacagaaggaaagcagggggaaaacgatggatcaaacaaatgaaactaaaatattagtagtagatgatgaagccagaattcgacgccttttaagaatgtaccttgaacgggaaaactatgtgattgaagaagcggaaaacggcgacgaggccattaaaatggggctggcatcagattatgatctggtgctcttggatttaatgatgccgggaacggacggaatcgaagtatgccggcagctcagagaaaaaaaagcgacgccgattatcatgctgacggcaaaaggggaagaagccaaccgcgtccaggggtttgaagcgggtacggacgattatatcgtcaagcctttcagcccgagagaagtggtgcttcgggtaaaggcgcttttaagaagggcttcccaaacatcttatctgacagccaataccccgacaaaaaatgtgctcgtcttttcgcatctatccattgatcacgatgctcacagggtgactgcggacggcacggaggtgagcctgacgccgaaggaatatgaactgctgtacttcctggcgaaaacaccggacaaagtgtacgacagggaaaagcttttaaaagaagtgtggcagtatgaatttttcggagacctcagaacggtggacacccatgtcaaacggctccgtgaaaaattaaataaagtgtccccgggagcggcgaaaaaaatcgtcaccgtatggggagtcggatacaaatttgaggtaggcgctgaatgaagttttggaaaagcgtagtaggtaagctttggtttaccattctttcactcgtgttaattgttttatttattttaacggtgctgcttctggaatttatagaaaattaccacgttgaagaagcggaaaaagatttaacgcagcttgccgacaaaattgcggtcataatagaaaatcatgaagaccagccgcttgccagatccatcacgtgggaactggcggacaatttaacgagcatcgcgatcattcaggatgataagcatgtctggtattcgcccaatgacgataatcatttatcctctattacattagagcagatcaaacatgaccgggatctgcacaaggcgctgacagaccgcaaaaaagtaagcaaacgcgcggtccccaacaatgccggttcggataacgaacggctgatcgtcggagtgccgtatgaaaaagacggcaaaaaaggcatggtctttttatcccaatcgctgcttgccgtcaaagatacgacgaaacatacgacacgctatatttttcttgcggcgggcattgccatcgtcttgacaacgtttttcgcgttctttttatccagcagggtgacatatccccttcggaaaatgcgggaaggcgcccaagacttggcgaaaggaaagtttgatacaaaaattccgattctgacccaagatgaaatcggggaactggccattgcctttaatcagatgggacggcagctcaatttccatattaacgcgctgaatcaggaaaaagaacagctgtccaatattttaagcagtatggcagacggggtcatcaccattaatatcgacggcaccattttggtgaccaacccgccggccgaacgttttctgcaggcatggtattatgagcagaacatgaacattaaagaaggagacaaccttccccctgaagcaaaagagctatttcaaaatgcagtgaacacggaaaaagagcaaatgattgaaatgacgcttcaaggaaggtcatgggttttattgatgtcgcctctttatgcggaatcacacgtccgcggcgccgtggccgtgctccgtgatatgaccgaagagcgcaggctggataaattgcgtgaagacttcattgccaatgtcagtcatgagctcagaaccccgatttctatgctgcagggatacagcgaagcaatagtggacgacattgcaagcaccgaagaggagaaaaaagaaatcgcgcagatcatttatgatgaatctcttcgcatgggccggctcgtcaatgatttgctggatttggccagaatggaatccggacatacgggcctgcactatgaaacggtaaacctgcatgaatttctggagaagatctcccgcaaattttccggggtagcgaaggaaaaaggcgtttcgctcacagaggacatctcagtgtctcagccggagtgtgtctttgacgaagacaaaatggaacaggtgtttaccaaccttatagataatgcgctgcgccatacagagtcaggcggaagcgttcatatcgcggctcagaccgtaaaagacggacttaaaatcgatatcaaagattccggctctggaataccggaagaggatctgccttttatttttgaacgtttttataaagcggacaaagcaagaacaagaggcagggcgggaaccggactcgggctcgccatcgtaaaaaatatcgtggaagcccacggcggctcaattgcggttcacagcagcatcgacaaagggacgacgtttacattttatattccgacaaaagtgcaggatgacgtctgaaattgacgaacaatcttgttccatacgaaacacccgcatgttctgcgggtgttttttatttgtttctcctttaaaaatttaagaatatgttaatataaattcccttccaaattccagtttcccgtaatatagttgtaatgtaacttttcaacgcatttttacgacaaaaaagtgaacggaggggtttcccatggaagaaacctttcagatattatatgatgcataccatcaagatttatatcaatttttattttatatggtaaaagataagtcgcaggctgaagatttgacgcaggaagtgtatatccgcgtcttgaattcctatcatacatttgaaggaagaagcagtgagaaaacatggctgttatccatcgcacgccatgtggcgattgactggttccgcaagcagcagacgatcagacagcgtattatgggtacgtttgattgggatacacaagatgtcagagatcagcatttgcttccggacgaactcgccgtacagcatgaaaacgtccgggaaatttataccgcgcttgatcattgcaccattgatcaaagagctgttattatcttgagatttattcagggatattccattcaggaaacagccgccgctctccgcttctcggaaagcaaagtcaaaacgacccaacacagagggctcaaaatacttcggaaacagatggagcttttgagggaggagctattggatgatgaagtcatattggaacgaagaaagagtagaggagttgttaagacaacttccggcggttagagatcatcgttcacccgaggccatttaccggaatattgaaacgggtaaaccgtacaggaaaaaaccggcccgaagctggatcggccccgccgcagccggcgtctgcgcattgtgcatcgctctgattatatctcctcacctgatgacaaacaaatcttccggtgatcttaccgctgacagccgccagacagaaaaagccagtcagtcagcttctgtcaagccatcggatcagaagacgttcgtcgtctcaaaccaaaacaaaaacaattacattactttggcatttgccgattcagaaacatccgccgtcattccggtcagttttgaaaaaaagaagccggatgaatcggtttcagaggctttatccgaagcggaagacctagaagtgcccgaatccttcctgtctgtgccgaaccttttggacggtgtgcaggtaacggcggataagaaggatttgcttgtgcaggtaaacggacggctctctatcgaatcagttgccgatgctgacttattgaaaaagatgctgaaagagactttgacatggagtccttacgagcggattaaattgaaaaaggttcaaaacggagccggacaggatttttataaatcttacggcatttccgctgagatgtccgtacataaacaaacaaaccgggcgtatttttcttacagcgacagtctgggacaagagtatctcatcccgtctgaacaaacctattattcagtatatcaggctattgacgggatgaagacaacagacggaggctcacagactgcgagcattatagaagccgatgcgattgcatcggtatcggaaagggaagacggcgagcagctgcggattcaattgtccgaaaaacataaggttgaagattcgctggaagggattttaatgatcgaagggcttctgttaactgcgaaggaattcggttattctgaggtgctgttcacacatgcgcatgcaaagaaaatcggtaattatgatgtgacaaaacctatcgctgtgcctgccgcgcctaatccgcttccaagccattaaacgtaaaaaaacccaaaacatatgaatgttttgggttttttgttggttacggaagatcaatcagtttaacggaaacaatatcctgaattgaagtcagctcattgacgactttatcatctaaatgtttatcaaaagaaagcatcataatggcttctccgcctttttctttacggcctacctgcatggtagcaatattgatatcgttatcgccgaggatgcgtccgacgcgtccgattacaccagtcgtatcctggtgctggatataaacgaggtggccggcaggatttaagtcaatattaaagccgttcagttcaacgattcgttcaccgaagtgagggatatacgtagccgttaacgtaaatgtgctccggtctccggttacttttacgctgatgcagttatcatatcctgattcattggaggaaatcttctcgctgaagctgattccgcgttcttttgctacaccgccggcgttcacttcattgaccgttgagtctacacgcggttttaagaaaccggacagcagactttttgtaataaatgatgtttcaagtttggcgatggtgccttcatattgaatcgcaacatctttgacgggttccttcatacattgtgacacgagacttccgattttatcggcaatttggtgataaggctggatttttttgaattcatctttcgtcatcgcaggcaggttgatcgctgacatgacaggcagaccttttgcaaactgcagcacttcttcagaaacctgtgccgcgacattcagctgtgcttctttcgttgaagcgcctaagtgaggtgtggcgatcaccagcggatggtcgggaagctttgattcaactggcggttccacttcaaacacgtcaagggcagcgcctgcgacatggccgctttccagcgcttccaaaagcgccgcttcatcaataatgccgcctcttgcgcagttgataagacggacgccttttttcgttttggcaatggtttctctgttaagcagtccttttgtttcctttgttaaaggcgtgtggacggtaatgatatccgcgctttcaagcacttcttcgaatgtccggctgtttacgccgattttgccggctctctcttcggttaagaaaggatcgaatacatgaaccgtcataccgaacgctctggcgcgctgggcaatctcgcttccgatccggcccagaccgacaatgcctaaagtctttccgtagagctccgccccgacaaaagccgtccggttccattctcttgattttactgagatattggcttgcggaatgtgtctcattaatgaagaaatcatcgcgaatgtatgctctgccgttgaaatggtgtttccattcggcgcgtttatcacgataaccccatgttttgtggcctcatcaatgtcgatgttgtctacgccgacaccggctctgccgacgatttttaaagaggtcatttttttaaacaattcttcggttactttcgtggcactgcggactaacagggcatcaaaggtatgtaattcatcttctgcatccgcgacgtttttttgaacaatttctataaagtctgattccatcagcggctttaagccgtcattgctcatcttatctgagaccaaaactcgaaacattgttagatttcctcctagtttagctgactaaatatctgataatttatcatattctcaatagagtgtcaatgtgtattgacgcagtaaaggagaaaaggaaaccgctgaatcagcttaaattgggcttccccaatattttatttaaatttgagcagttctctatacaattgcaatttgatcatatataatgtgaataaattcataagatcaatcttcggggcagggtgaaattccctaccggcggtgatgagcatcatgctctaagcccgcgagctgcttcggcggcaggatccggtgagattccggagccgacagtatagtctggatgggagaagatggaggttcagcagacgttttgatgcttatatcaaacgtttctttgccaagccttagtaagctcccgctttttaacaaaagcggtttttttattggggcgcaaaagaacctttcctcttttcgagagatttgatcgaaaaggagagagcattgtgaaagtaaaaaaattagttgtcatcagtatgcttagcagtattgcttttgtgcttatgctgttaaatttcccgtttccggggctgccggattacttgaaaattgatttcagtgacgttcctgcaattatcgccattttggtttacgggcctgcggcggggattgcggttgaagcgattaaaaatattctgcagtatatcattcaaggaagcatggccggcgtgcctgtcgggcaggcagccaattttatcgcaggaacgctgtttattctgccgacggcgtttatgtttaaaaagctcaattcggcaaaagggcttgcagtgagcctgctggccggaaccgcggcgatgaccgtgctgatgagtattttgaactatattcttatcctgcccgcgtatacttggtttttacattcaccggcactgtcaaacagccagttaaaaacggcggttgtggcaggaattctgccgtttaacattgtaaaaggcgttatcatcaccattgtctttacgttcatctttacgaagctgaaaccttggattgaacaaaaacgcagcatccagacacaataaccactccaaagcgcccgctctgtaaaacacagaccgggcgcttttttgattgtttgatcacgcaaaaaaaataagactccggccgataacagccggagtcttattcaggacgaaaaagctcctctcacggggagggcttttttattcgtatttcagcgggtcgccttcgaacggttcatccgcaactttgattgaatcagtagggcatccttcaaatgcgtcaatcatatcttcttccagaacttccggaacttcgacgacgcctttattttcgtcaagcgtaacgaacgcaatgccttcatcatcataatcataaatgtctggtgccgcagctccgcaggcgccgcatgcaatacacgtatctttatctacaattgtgtactttgccatgaataaaacctcccagattgttcgtgttggaacaaatggtttaccttatatatttttaaatataacacctattcctcttacttattgtaatgatgttagtgtcaaatttcaacagaaaaatgattgagaatgcttatcacataagggattctctttagcacttccccctaaaagatgactttaaacgtcaaatttatatgaaaatctgttaaaataaaaagaaccaaaaaacgaaacttgtcacagaagaaatgtaggtgtgtttagattggcgataaactactttgataccgtggttctcgactgtctggacaaaatagacggcgaacggactccgagtgctgtgtttcatttattaaaaggaaaaaagtcgtctcaaaccattcaggatgccggcttatttcagatcgctaaatatttcggcatggcttcacattgtgaacgcggcgatattgcggcttctttgcataaactcaccgagaactcatacattacagccggaaaagaagagggaacgtggaaagtgactgcgcatggcgttcaaaggcttgaacgggcgtttgccgagcggccttggccgaagcactgccacggcgcgaattaccaaacgcctgccgtcaccctgtggaggcggctttccctgctcattcaagtcctgtcaaacaaagagcatcaatgcagtcaatatatcccggttacaaacgatgtgcagacgctgagatgggtcaaacggttcatgcggaaaaacagagacgctaaagagctctccgtccaaatgcatgagacgctgtttcaccttctgcaaggcgtaagtgaacggcaggcgcttatttttgtctattctttaacttcattcaacagaatcggcaaaacgaataagcagcttgctctccagctgaacgaagatgaatggtatgtgtccgtccagttttggggagcggtacattatgttattcaatcgcttccgcaatgtgcatatcccgctctgcgtgagctgttgtccgatctgcaggcggaaagcgcgctgacacagtctgccagaaaaacctttgagctgttggaaaaagggtttccgattgaacggatcgccgcggtcagaaatttaaaaaccgccacaatcgaagatcatatcgtagaaatatcattgcatcagcctgcattttttatagaacagtatctttctgaagaggaacagcgtatgataacggcatttgcaaaacagcatcaaacgaataaaattaaacggattcgcgaaggaatgcagatgcgcttcagctattttcagatcaggctggcgctggcaaagacggtgaatcagcatgactgagctgcataaagctttatccaggtattttggtttgcattcctttaaaaaagggcaggaagagattatgactagcgtgctccaaaaaaaagatacgatcgccatgcttccgaccggcgggggaaaatcattatgctatcagctcccgggttacatgatggacgggctggtgctgattatttcgccgctcctttcattaatggaagatcaggtgcagcagctgaaagcgaaaggagaaaagcgggttgcggcattaaacagcatgctgaattccgcagagcggcattttatcctcagcaacatcagccggtataaatttctctatatgtctcctgaagccctttcttcaccttatgtgctgaaccgtttgaaaaatgtcccggtcagtttatttgttattgatgaggctcattgcatatcagaatggggacatgatttcaggcctgattactcgaagctcgggcctttcaggcaggcactcggaaagccgcctgtattggcgctgaccgcaacagcgacaaaagaaacgctcagagacgtgacggatgtgctcggacttgagcatgcggtgcgtcatctttattcagtcaaccggccgaatattctcctggcggcagaacatttggctgataatgccgaaaaaataagcaggctcacggagcttgccgaaaagcttgaaggcccgggtatcatatattgtccgaccagaaaatgggcggaagagcttgcggctgagctgaacgaaaaaacgggaaagcggacggattattatcacggcggaatggatacaggcgacaggattttaatccagcagcaatttatccataaccagcttgattgcatctgctgcaccaatgcgttcggcatgggtgtggataagtcagatatccgctttgtcattcacttttatcctccccaaacggccgaggcctttatgcaggaaatcggcagagcgggacgcgacggcagcccgagtgtcagtattttgctgagggcgcccggcgataccgagcttcagcagcagattattcagacagaaagcctgtctgattatgacctggaaggcattctggccgtcatacgggatgccggtacgagtgatgaacgaaagcttcgggacgtcctgatcaataagggagtccaggaaacacaggcgcgaacggccgtccatctgtttctgcgaggaaaaaccacaaaagaccagctgcgggaagaactgacataccgcatggaaaagaagctgcgtaaaatgaatcgtttttcggcgttattagagcggaaagaatgtataagagaagcgctgctgtcttattttgatgaaccgtatgagcctgatggtcaaaccggacaatgctgcagcagctgcggacttgatctggctccgtacgagcaaaaaggagaacgtaaaaacatggaacggtttgaagattggaagctggaattaggccggattttcggatcagagtctgcgggtgagttcagctgagacggcaaagcgaattgatccggcagctctcagaccgggagattgtgatgcagctgtacgccacccaattgctcatattggcggtttcagctgttatcggctttttcttttttaccgacattcacgattttttaaagctgtggcatatacgtgacgataatatcatatggtacggtgtaactcttgccgtccttgtcatttttgccgatctggcggtgatgaaatggtgtccttcgcatttatatgatgacggcggcattaatgtattgctttttaagaacaggccggttctgcacattttgtttttgacgcttctcatttcgttcagcgaagagattttgttcagaggcgttctgcagacacatatcggcttatgggccgccagcttcatttttaccgtgcttcatttcagatacttggcgaagtggcttctgtttatgatggttgcgggcatcagtcttttgctggggcttatctatgaatggaccggcaatttattcgttccggttacagcgcattttattattgatgcggtatttgcctgtcagatccgttttcaatatgttaggaggggtttgcatgacggaaatgtcaagagttgaaagaagaaaagctcagctgcgtgccgagcagcaggttgccgcggccgcggatgaacaaattgaatatcttgaagacagcctcccgacaagacaatctgtaaaagaggagcgtaaaaaaaaggaagagcaggtgaaggaaaaaaccaaaacaaaaacgccgctgttcacttttctgaccgtcctgttcattatcgtaacaatcggtgtctttttcggtcttctttatatgacgaacagcagcagatttgacccgaaggactatgaagatgtcttcatagaccacagtgaaagcgcgcctgccgttattccgaaaggcgctcagaaagaaacgtcagaaactgctcttttagaacaaccgaaaaaaaagtctgacgacaaagataagaaagaagcggctgcacctgaaaaaacgaaagaaaaaccaagtgaaaaaacacctgaaaaaacggaaacgccctcagaaaaacaagtaaagccgacagacaccgattacgcggagacaaaacagcagtctccgccggctgtccgtgaaaaagcggctccggctgaggcgagtgatcaagccgggactgtcccaaaaaaagtgcggaccgtacagcatactgtacagccgaaagaaacgctttaccgcatttcaatgaaatactataaaagccgggcgggcgaagaaaaaatccgcagctacaacggattaaacggaaacgacgtgtacaccggccaggttctgaacattccgctgtctgattaaaataaatgcatgttttcaccgtgtttttcatatagtgtaccaatgaaaacggacaaggtgtgaagcgcatggattctttatggaagcaattagaccgatttgctgacggaccgacgaaacaaatgcttcaggcgctggtgaaacggaaattaaaatacgaaaattatgccgcacaatgccgaagatggcagtgggcgtccctcgtttgtttttccctgatgtgcatactgctgatgtttaaaagctttaatgccccccaagcctctccgcagctgattctgcaggaaatattaggccatacggtttacttgtgctggattatggcttccgcttttgcgtattgcacttcttattatttcaaaaaaaaggaagaaaaagctgagggtgaatttcataaactgaggtgtgaaattatccaaaaaagcacggatttatggccccagcctgaaaaatggagggcgagagaatctgtttttcacttgatgaaacatcggtatgatatcaatctttattttgaaagcaaataaaatgaggcgttttccggaaaggatagaaacgtctttttttgtttgtccgtctaatataagacaatgacagaatggagagtgcgtttatgaagcttacagcgggaattctcggctcattggcgggagcggctgcggttatggcggccgttatgtacaaaacggcaaacggcagccatctgaaaacacatacatttacgcttgataaaatgaaggggatgaagccgctcaccatcttttttatatctgacgtgcaccgccgtttaattgatgaaaagcttctccgcgaagcggcaggttataagccggatgccgttttgctcggcggtgatttggcggagggcggagttccttacgccagaattgaagaaaacatcaaacgtctgacggctctcgcgcctgtcatgtatgtgtggggaaataacgattacgaggtcagccagcaaaaactgctctctcttttacgggcatacaaagtgatcccactgagaaatgaatcggttcaatttgcttataaaggggaaaccgttacgatctgcggggtggatgatatcaggatgatgatggatgattacgaatctgcaatcagatatacggatgctgacaaagtaaacctcctgctttgccataacccggacatccatgagcagatgagggagtcagacgggattgacgctgtgttcagcggccatacgcatggcggccaaatccgtttcggccggttcgggccgtacgaattgggcgggacgggaacggtaaaaaaagcgcattacctgatcagcaacggctacgggacgacaaaagttccgctgaggctcggggcgaaaccggagacgcatatgattacgctgtgcggaccggatgagccgtcttcctgaaacaaacccggccgcggtgataaaaaacggcattctgcttgtcttcccgctgtacacggtgtaaactgataacaaattaagaacctatgactcatttattcatatactgtgttatatgatttgtgtgcaagaagaggcaggagggaacattatgcggcttgagcgtctgaactataataagattaaaatctttttaaccctcgacgatctgactgatcggggactgacaaaagaagacctctggaaggactcgtttaaagtccaccagttatttaaagatatgatgaatgaagcaaatacagagctcggctttgaagcgaatggtccgatcgcggtggaagtatattctcttcaggcacaaggcatggttgtgattgtaacgaaaaatcatgacgcggacgcagaagatgacgaatatgacgatgattatatcgagatgcaggtcaaacttgacgaaagcccggatattatttatcagttccattcgtttgaagatatcattcagcttgccggaagccttcaccgaatcgggattaccggcggcaccgtctaccactatgagaaccaatactatgtaagccttgaagacctcggctcccgttccgccgaaggcgtcatcgcggtgctggctgaatacggacacccggcgacgattacgatttacaggctccatgagtacggaaaactcatcatggacggcaatgctgtggagaccatccagaaacatttttcataaaaaagatttgaaacggcagctgttttcagcggccgtctttttttaagcgaaataatggaaaaatcattgtctttcttctatgcacggagatattgaaggtgtatactagtcactgaaagggagcatgagagaaacagaagattttaggaggttaactcaaatggcagccgatcgattcaccggtcataatgaagaagacaaacatgatgtattaaaatcaacccaaaccgtaatacataaagctctggaaaaattggggtatccagaagaagtgtatgaactgctgaaagagccgctcagattattaacggttaaaattcctgttcggatggatgacgggtctgtgaaaatatttacaggctatcgtgcgcagcacaatgattccgtaggtccgacaaaaggcggcattcgttttcacccgaatgtaacggaaaaagaggtgaaagcactttccatctggatgagtttaaaatgcggaattattgatcttccttatggcggtggtaaaggcggaattgtttgtgatccgagaaatatgtcattcagagagcttgaaaggctgagcaggggatatgtcagagcaatcagtcagattgtcggaccgactaaagacgtcccggcacctgacgtatttacaaactcacagattatggcttggatgatggatgaatattcaagaattgatgaatttaactcacccggctttattacgggaaaaccgcttgtactcggcggatcccacggcagggaatcagcgacggcaaaaggcgtcaccatctgcataaaagaagcggccaagaaaaaaggtctcgatattcagaacgcgcgcgtcgtcgtacaaggtttcggaaacgcgggcagctatctggccaagtttatgcatgacgccggcgcgaaagttgtcggaatttctgacgcgtacggaggcctttacgatccggacggtcttgatattgattatctgcttgaccgcagagacagcttcggaacggtgacgaagcttttcaatgacaccattacgaatcaggagctgcttgagctggactgtgatatacttgtcccggcggcgatcgaaaaccaaattacagaagagaacgctgaccgcatcaaagcgaaaatcgttgtagaagcggcaaacggaccgacgacactggaaggaacgaaaatcctgacagacaaaggaacgctgctggttcccgatgttctggcgagcgccggcggtgtaacggtttcttatttcgaatgggttcaaaacaaccaaggcttctactggagtgaagaagaagtcgaggaaaaactggaaaatatgatgataaaatcgtttaataatatttatgaaatgtcccaaaaccgccggattgacatgaggcttgcggcttacatggtcggcgtgcggaaaatggcggaggcttcgcgtttcagaggctggatataaaccaatcgtttgcataaacaaaaaaaatctcctatgataatataggagattttttatatgagtggaaacttatgatggaaatgccaatcgcaggagttgaaggacatgacagaagaaaaagcaattataataggcggaggtccttgcggattatcggcggctatacatctgaagcaaattggcgtgaactcgcttgtgatcgaaaaagggaatgtcgtaaacagcatttataactatccgacccaccaaacttttttcagttcaagtgaaaaattggagatcggcgatgtcgcctttattacggaaaacagaaaaccggtccgcatacaggctctctcttactacagagaggttgtcagaagaaaagagctgcgcgtaaacgcctttgaaacggtggagcgcgtaacgaaacaggaagacggccgttttcttgtagaaacatcaaaagaccgctacctcactccgttttgtatcattgcgacaggatattatgatcatccgaattatatgaacataccgggtgaagggcttcctaaggtatttcattactttaaagaaggccatccttattttgataaagatgttgctgtgatcggcgggaaaaactcaagtgtggatgcggctttggaactggtgaagtccggtgcgcgcgtcacggtgctctacagaggacatgagtactccccgagcatcaagccgtggattctgcctgagtttgaggccctcgtcagaaacggcacaatccggatggaattcggcgcttgtcttgaagaagtgacggaagatgaaatcattttccgctccggccgaaatgagacggtccggctgaaaaacgatttcgtatttgccatgacgggataccatcccgatcacggtttcctcgaaaaaatcggtgtgcggattgatgcggaatcaggccggccgtttttccgggaagaaacgatggaaacaaatgttgacggtgtttttatcgccggagtcattgcggctggaaataacgccaacgaaatttttatcgagaacggccgttttcacggcggcttgatcgcaaatgaaatatcaaaacggctgggtgcagagagcatatgatcattcatatgctcttttttaaaaaaattgaaagatgtaaaaatatgaacaacatggtacgatagatataggaatataaaggaaagaggttgcctgatgtttgcaatcatctctgcaggaattgctcccggcattgcgctgttaagctatttttatttaaaagatcagtatgacaatgaacccgtacatatggtgctgaggtctttttttctcggggttgttcttgtgtttccgaccatgtttatccaatatgttcttgaaaaagagcatgtagggggaggaagctttttcgtttcgtttttgtcttcgggatttctggaagaatcggtgaaatggttcgttctgatgatcagtgtgtatccgcatgctcattttgatgagcattatgacggaatcgtttacggggccagtgtgtctttaggatttgccacgcttgaaaatattctgtatctattcggccacggcgttgagcatgctttcatcagggcgcttctgccggtctcctgccatgcgctgatcggagtgattatgggattttatctcggaaaagcccgcttttcgcagaaaaaagcccgtgtcaaatggcttgtgatttcgctggccgtgccttcatgtctgcacggttcttacgattttattcttaccgccctcaatcattgggtatattatatgctgccgtttatgctgtttttatggtggttcgggctgcgaaaggcaaaaaaagcacgctccgtcaatatgatccaagtgtgaagaaaccgcgcgtcgcgtgcggtttcttttttatgccttgacaggggataagaaggaaacgtgcataaaaataacctcgtgacagacaatacgggtacactttaaattttgcagtaggaggcttgaagagatgaagtgcaaaggagcctttatggcatgtctcattctattttctttcgccgccgctttcttcgatcatcatgaaacggttcatgcgttttcaaatcaagtgattcaaagaggcgcgacgggtgatgatgttatagaattgcaggcccgtcttcaatataacggattttataacgggaaaatcgatggtgtttacggctggaccacatactgggccgtgagaaattttcaggagaaattcggcatgaaaccggttgacggcctcgtcggcgcaaaaaccaaacaggtgctgatttcaaaatcaaaatattaccgtgaatatgtaatggagcagatccaaaaagggaatacgttcactcattatggcaacgtcccattggaaaaccaaacaaaaccgagagccggaacgcagaagccggcgggaacgaataagcctgctcaaaagccgcaaaacaatacaggcggtcagtcaaatcaaaagcaaaatacgacagcggccaatatgcctggcggtttctcaaacaacgacatcaatcttctggcacaggctgtgtacggggaagcacgcggtgagccgtttgaagggcaggttgccatcgccgcggttattttaaaccgtattaaaagcccgttatttccgaatacggtggccggcgtcattttcgaaccgctcgcgtttaccgccgttgccgacggccaaatatatatgcagccgaatgaaagagcaaaagaagcggttcttgatgcgatcaacggctgggatccttctgaaaacgcgatttattatttcaatcctgatacggcgacaagcaaatggatttggggacgtccgcagataaaaagaatcggaaagcacattttctgtgagtaaaagtacgcaaaatgaggtgttaacatgattagaggaatcattatcgctgttctcggtgtcgcgatcgccgcaaccggatactggggatataaagagcatcaggaaaaagatgcggtccttctgcatgcggaaaataattatcagagggcttttcatgaattgacgtaccatgtagatcagcttcacgacaaaatcgggacgacgcttgcgatgaacagtaaaaaatctctgtctccggcgctcattgatgtatggagaataacatctgaagctcataacaatgtgagccagctgcccctgactctcatgccttttaataagacggaggagtttttatccaacataggagatttcagctataaaacatccgtccgggatttagaccaaaaaccgcttgataagaaagaatatacaacactgaacagcctgtacaaacaggcggagaacattcaaaaccagctccgcagcgttcagcatctcgtcatgagcaaaaatttacggtggatggatgttgagatggcgctcgcctctgacaaaaaacaaagcgataatacgatcgtcgacagctttaaaacagtcgaaaaaaatgtaggcgctttttctgaagacagcatcagccccacatttacgggagcaaatacagaacgaaaaggttttacgcatctgaaaggaaaacaaattacggagaaagaagcggtcaaaatcgcgcaacggtttgcgcctgatcataattattcaattaaagtggtcaaaagcggcaggaagacgaatcgggacgtatacagcatccgcatgaaagacgccgacaacaagtcttttatctatatggatattacccaaaaaggcggacatccggtctatttgattcaaaaacgggccgtgaagaaacaaaagatcagcctcaatgaagcatctaaccgggccgtcgcgtttttaaagaaaaatggatatgaaacaaaaggcctcgaaattgatgaaagcgcgcaatataataacatcggcgtcttttcttttatccccgtggagaaaaatgtccgcatttatccggaagccatccgaatgaaagtggcgctggatgatggtgaagtcgtcggtttttccgcgcgtgattacctggcggcgcaccgcacgagaacgattccggctcccgctctgtcagctgatgaagcgaaagcgaagctgaataaaaatgttgaagtgcgggagacccggcaggcgctgatcacgaatgagctcggtcaggaagtgctttgctacgaaatgctcgggacgatcgggaaagacacatatcaaatgttcattaatgcggacgacggaaaagaggaaaaaatagaaaagttaaaaagtgcagaacctatatataaagacctataaaaataaaggaggaaaggactaaaagtcttttcctttttttcgttacatgctttaataaaagcataaataatgaaagagtgaaggcccatgatagctgtcggagattatatttggattgaatacatagagaacaatgagcccaaaaaagcgaggagcaaagcagtaagcgttgaaaacggcgaactgcacatctcatatcccgtcgatctggattcgggacggacggtctttttgcataaaggattggaaataacagcggaatttatggggaatggccacgtgccgtatcaatttaaaagcataatcaaaggaaagaaaaaagaccccatcccgatgatcggattggacatcccccctcaggaggaaatgaagcggattcaaagacgccgatacgtccgtgcagacgcagtattggatgtatccgtcaaaatggaagcgaaaaaaaccgctttccaaacggtttcctctaatatcagcgccggcggaatcgctgttgtgatgcctgagcatatttccgcggaaccaggtgaaaagctgtatgtctcattttctcttcccggcaaggaaaatacagccgatattacggccgaggctgttacccagcggattttttatgatgaaaaggcggataaacaaaaaatgacgcttgaatttgcagaaatcgatcccgcatcgcagcagcttttactccaatattgtatgcgcgcgcagctgcagcagagaagaaacagtctgtcggaataaacagcagcgcacttttccatactaatcctaatggaggtgcgcgtgtatgaaaacgtttgaacgtctgctggtcaaattggtctgcattcagcttataattttgggcgcggtgcaatttttgcttcattatcagcctattgaaccttatatttcgaaagctgtgaaatatgagggagttgataaaatggagaaaaaagaatggattgaaacggtaaagcggtaaatcagctcaattttttcgccccttttccggcagttcatgatacaatccatagaggagtaaagagcaaggagagagattatggacaagaaattatcaattgcgatcgacgggccggccgctgccggaaaaagcaccgttgctaaaatagtggctgagaaaaaatcatatgtgtacattgatacaggagcgatgtatcgtgccattacatatacggcgctcaagcagaatgccgatttaactgatgaagcggcgcttacagagctgctgaagcgtacggaaattgagcttgtatccgttccggaaggacaaatcgttctggtaaacggagaagatgtgacagaagaaatccgtaaagacgaagtcagcaaccaagtatcaatcgccgccaagcataaaggcgtcagagaagaaatggtcaaaagacagcagcagctcggacaaaaaggcggtgtcgtcatggacggccgtgatatcggtactcacgtgctgcctgatgccgaagtgaaaatttttctgctcgcgtccgtagaggaaagagcgaagcgccgatatgaagagaataagaaaaaaggctatgacgtgaattacgagacgctcattgaagaaattgccagacgcgacaagctcgattcagagagggaagtttccccgctgcgcaaagcggaagacgcgattgaaatcgatacgacgtcactcagcattgccgaagtcgcaggaaaaattctggagatcgtcgaacagaaatcacgttaacttcgggcggagtgctttataatttttttcgaaagacaagatgttattgcttgacaaaccagtccatttattagaagttaatactaataaaactttttattgatcattcaaaatcttttttggatgattctttaatacatattcggctgaaaagcggacattcacatgttcagctttcaaaccgtattaattaagctgtgtaggtttggaccaaggaggttattcaaatgacagaggaaatgaatcaaattgatgttcaagtgccagaggttggagatgtagtaaaagggattgtgacaaaggtagaggacaagcatgtagatgtcgaaattgtcaatgtcaaacagtccggaatcattccaatcagtgaattatcaagtcttcatgtagagaaagcatcggatgtcgtaaaagttgacgacgagcttgacctgaaagtaacaaaagtggaagacgatgctttgattttatctaaacgtgccgttgatgctgaccgcgcttgggaagaccttgaaaaaaaattcgacacaaaagaagtgtttgaagctgaagtgaaagatgtggtgaaaggcggtctcgtcgttgatatcggcgttcgcggcttcattcccgcatcacttgtcgaagctcatttcgtcgaggatttcactgactataaagggaaaaccctctctcttatcgtcgttgaactcgaccgtgataaaaaccgggtgattctgtcacaccgggctgtagtggaaaaagaacagacagccaaaaagcatgattttctccaaacgcttgaggttggaagcgtgcttgaaggaaaagtgcagcgtctgactgatttcggcgcatttgtcgacatcggcggaattgacgggcttgttcatatttcgcagctgtctcattcacacgtcgaaaaaccgtctgacgtggtggaagaaggtcaggacgtaaaagtgaaagtactgtccgtagaccgcgataacgaacgtatttctttatctattaaagaaacgctgccgggaccttggagccagatcggcgaaaaggtaaaacagggagatgtgcttgaaggaaaagtgcagcgccttgtaagctttggcgccttcgttgaaattcttccgggcgtggaaggacttgtgcacatttcgcaaatttccaataaacatatcggaacgccgcatgaagtgcttgaagaaggacagactgttaaagtgaaagtgcttgacgtgaacgaaagcgaagagcgcatttccttaagcatgcgtgagcttgaagaagcgccgaaagccgatcaggaggacttccgccaataccaggcgaaagaagagccgagcaccggcttccagcttggcgatttaatcggagacaagcttaataaattaaaataaattggtgataaaacgtgacacgagcagaacgaaaaagagaacatataaatcatgcgctgtctaccggccaaaaccgggaaacggggcttgatgatattacgtttgttcatgtcagcctaccgaacctagcattggaaaaagtggatatatcaacgaaaatcggcggactcacaagcagttcgccgatttttatcaatgcgatgacaggcggcggcggacaacttacatacgaaattaacagatcgctggcaagagccgcgcgcaaagccggcatgccgctggctgtcggttcgcaaatgtcagctttaaaagatccctccgaacggtgttcttacgagatcgtcagaaaagagaatccggatgggctgatatttgccaatttaggcagcgaggcggatgccgagcaggcgaaaagggcagttgatatgattcaagcagatgccctccagattcatttaaatgtgattcaggagatcgtcatgccagagggtgacagaagctttactggcgctctcggccgtattgagcggattgcggcggaagcgggagttcccgtttttgtcaaagaagtcggcttcggaatgagcagggaatcggcacggcagttatttgatgctggcgcagcagcagttgatgccggcggatacggaggtacgaatttctctaagattgaaaatatgcgcagagagaaggcgcttcatttttttaatacgtggggaatttccactgccgcaagcttagcggaaatccactcgctctccgctgatcaatcaattatcgcatccggcgggctgcaaagcgccctggatgtcgccaaatcgattgccctcggcgcttccggcgcgggaatggcgggcactttcctgaaagctctcacctctaaaggagaagagggcctgtttgacgagatgacggcgcttttacaagagctgaaaatgattatgaccgccctcggatgccaatcggtttcccaattgcaaaaggcgcctttggtcataaaaggtgagacacatcactggctttctgaacgggggattgacacgtcccgtttcagcagacgttaaaaggcatgcgaacccgcatgcctttttctgttttttacgattttctttttcggaattccccgttttgctcaaggcttgtcgctcctttatggtgaatcgaatcatcgcgatcagattccacccgtcgggaggctttcagttttttctcctgtctgtcttttcccatccttatccgctcctttcagtcataattggtttaaaaaatgcgttcccgctccatactggtcagaggaggagcgattatggaaccgttttattattactggtcaatgtggtttttatggatacttgcgacttttatttttgccaaaacaaaaagccgcttttacgtatcagtctttattttgactaatatgatggcaagcatacatcagattacggcttattttacgctgaacgcggcatatgtcatgttttttgctgcggcatttgtttatgcgggaagcctcggcatgcataaacggctccgtaatattgtgattcatctgacggcggctgcggcgtacggctttatttttctttttgcattatatgaccctgtttggtttatcataaaacctgaatgggcggcggttataatgcttaccgttattacgctttccgttgaggggcggttccctgagaggctttgtctttttgttctcggcatgtgccagggggagctattgtatgctgcggtcatccgcaacattgcgggtgcagcagccgtcggtgattataaatggctttcaggctgttcggcgggagtgattcttctcgttgggctgactacatatgaacagcttgcggcgcgcatcagccaaaaaagcaaaaagcagggcaaaggagcgacaaaaatgtcttgaaaacagacggagactgttacatgaatgcgaaacattttgaagaatacattgtgatctcagtgaaaactgatataataaatgagttaagcccttctgtttgaagggttcttttcatagcgaagatgatttttaataaccggttgaacaattttttgtgaaaatgtaagcggctggattgaaaggaagggtactatgggtaaacctgtcgtagccattgtcggaagaccgaatgtgggaaaatccacaatctttaaccggattgcgggtgaaagaatttcaatagtagaagatacccccggagtgacgcgggaccggatatacagttcggcggaatggctgaattatgattttaacctgattgatacgggcggaattgatatcggagacgaaccgtttctgacacagatccgccagcaggctgaaatcgccatggacgaggctgatgtgatcatctttatggtgaacggccgcgaaggtgtgacgtctgcggatgaagaagtggcaaaaatactgtatcggacgaaaaaaccggtcgtattagccgttaataaattagataataccgaaatgagagcgaacatctatgacttttatgcgctcggctttggagaaccgtatccgatttcgggcacacacggtttaggattgggagatttgctcgatgcttgtgccgagcattttaaaaacattccggagacgaagtacagtgatgatgtcgttcaattctgcctgatcggccgcccgaatgtcggaaaatcatcccttgtcaatgcgatgctcggcgaagagcgggttatcgtgagcaacgtagccggaacgactagagacgctgtggatacggcgttcacctacaatcagcaggaatttgtaatcgttgacacggcgggaatgagaaaaaagggtaaagtatatgaaacaacagaaaaatacagtgtgcttcgggcgttaaaagccattgaccgctcagacgtcgtcggcgttgtgctgaatgcagaagaaggcatccttgagcaggacaagcggatcgccggatacgcccatgaagccgggaaagccgtcgtcattatcgtaaacaaatgggatgccgttgataaagacgagcgcacgatgaaagaatttgaacagaatattcgggaacatttccaatttctcgattacgcgccggtgctgtttatgtcggcactgacgacaaagcggattcatacactcatgcctgcgattattaaagcgagtgaaaaccactctctccgcgtgcagacaaatgtcttaaatgatgtcattatggatgcggtcgccatgaatccgactccgacgcacaacggctcccgtctgaaaatttactatgcgactcaagtcgctgttaagccgccgagcttcgttgtttttgtcaacgatccggaactgatgcatttttcttatgaacgctttttagaaaaccgaatccgggacgctttcggatttgaaggtacgccaattaaaatatttgcaagagcaagaaaataaaaaggtgtgatacagagatgaaaaaagtggcaatgcttggagcgggaagctggggcactgcactttctttagtgctggctgataacggacatcaagtcatgatgtggggacaccgtgccgaattgatcgatcaaatcaacgaactgcatgaaaacaaagattacctgccgggggtggagctatcaagttctatcatcggtacagctgatttaagcgaggctttaaaaggagctgacttcatcatagtggcagttccgacaaaagccattcgggaagtgctgaaaaaggctctgccgtacatcccgaaacaatcgatttttgttcatgtcagcaagggaattgagccggattcgcttctccgcatttcagaattaatggaagaggagctgcctgaggagtacagaaaagacatcgtcgtgctttcagggccgagccacgctgaggaagtcggattaagacacccgacgactgttacatcatcttcaaaaaatatcaaggctgcagaagcggttcaggatttatttatgaaccagcatttccgcgtctataccaatccggatatgattggtgtggaaatagggggagcgttaaagaatatcatcgctcttgcagcggggattacagacggattgggatacggagataatgcaaaagcggccttaatcacccgaggtcttgctgaaatcgccagactcggcacaaagatgggcggaaatccgctcaccttttccggcctgacaggcgtaggcgatttaatcgtgacgtgtacaagcgttcattcccgaaactggcgcgccggcaacctgctcggcaaaggatataagctggaagctgtcctggataagatggggatggttgttgaaggcgtgcggacgacgaaagctgcgtatcagctgtctcaaaaataccaagtgaaaatgccgatcacagaggcgcttcaccaagtgttatttaacgggcagaaggtagaaacggccgtagaatccttaatggccagagtgaaaacccatgagatggaagacttggtcaacacattcgaaaaccgggtgaagtgacaataacatgccgtcagcatattctgaagtgacgaaagtccaaaacgcagaactctccggctgaaatcgcttaaaacatttgctgatttaggcagaagaggatgcagacgtatgcatctgcgcatactatagcatcgaagtccaagagagtgtatctcagacgtacaggtgaatatagtcaacttgactgaagcaaagtccccctctttgcttcagtttttttgttttttcaatagatggaaaacctgttgatcttttcaacatttgtatattaaaatgaaatataacgcttacaatgatgggacggggggcacgaacgtgagtgtggcattgatgaaaatgtggtttgcgcttggtgcgatgggattaatgtttgttgcggtggcctctatttatgtcagcaggtacaaagtgaaaaacaaactgataaaagcagcggtttcttcactcgcttatgcctgcatggtcatctcgggattgatcgtgttaatggtcgttttcagcgggcctgtcaatgaataaagcaaaaagggggcgcggaatgcataagttaaaaatggccgtcataacggcaatggcggtgcttctgctgtccggctgtctgtaccctgaaacggaaaaaactgaaaataaagtatcttacaaacatcagcttcagcaggtgcaagcggcagtggatgaatttaaaaaggcgaacggcggacttctgccgattcagacaaaagatatgaaaacaccgctctatcaaaaatatccgatagattttaagcggctcgcgcccagatacatagaggagccgccggcctcagcttatgaaagcggaggaatgtaccaatacgtgcttgtcgatgtggaaaataagccgaccgtcaagctggtcgatctccaaatggcggaagcaatccgcgacatgaagctgcgtgtcaaaatgtatcaggaaaagcatacatatcctccctatgaggacgccgtttcaaaagggcttttcactttaaataaaaaaaagctcggcatgaaagactctccttcagtcaaaagtccggtttcaggcacgtctctgccgcttttaatcggcgctgacggagaaatctatgccgactatcgcgtcgatctcgcccgctgcctgaaggaaaacaaaaagaaaatcaaaccgggcgcggaaattcaagatattttatggaaagagactcctttcgtcccggccttttcagtcacatacaccgtaaatgaaaaacaggaacccgtttttttagaaagtcaaacgaaacaggaatgaacctttttcccgcgcatacaaatagggagaaaggtttttttgattttgatagaaaagactgcctgaaaattttctaaagatgtcatattgaaataggacaacgtcatacacatatagtgtcctgtatttgattggagaatggtgaatgaaaaatgataaggataggaagtccgggaggggatcacttggaaaaggtcgatattttcaaggatatcgctgaacgaacagggggcgatatatacttaggagtcgttggcgctgtccgtacagggaaatctacattcattaaaaaatttatggagctcgtggtgctcccgaatatcagcaatgaggccgatcgagcgcgggcgcaggatgagcttccgcaaagcgcagcaggaaaaacgataatgaccacagaaccaaaatttgtcccgaatcaagccatgtccgttcatgtcgcggaaggacttgatgtcaacatccgtcttgtggattgtgtgggatatacggttcccggggcgaagggatatgaggatgaaaacggcccgagaatgatcaatacaccttggtacgaagaaccgattccctttcatgaggcagcggaaatcggtacgagaaaagtcatccaggaacactccacaatcggggtcgtcattacgacagacggctcaatcggcgatattgcgcggggcgattacgtggaagcggaagaaagagtcatcgacgagctgaaggaagtcggcaaaccatttattatggtcatcaactcggtaaaaccgtaccacccggaaacagaagcgctcagagctgaattaagcgcgaaatatgatattcccgtcctcgcaatgagtgttgaaagcatgcgggaaacagatgtgttaagcgtcctcagagaagcgctttacgagttccctgtgctggaagtcaatgtcaaccttccgagctgggtcatggtgctgaaagaaaatcactggctcagagagagctaccaggaatcagtgaaagaaaccgtaaaagatattaaacgcctgcgcgatgtcgaccgggttgtcggccacttcagtgaatttgagtttattgaaagcgccggtctggccggaatcgaacttggccagggtgtcgcagaaattgatttgtatgcgccggatcatttatatgaccagattttaaaagaagtggtcggtgttgaaatccgcgggaaagaccacctgcttgaattaatgcaggacttcgcccacgcgaaaaaagaatatgatcaggtatcagatgcgctgaaaatggtgaaacagaccggctacggcattgccgccccggccttagccgatatgagccttgatgaaccggaaatcatcagacaaggatcaaggttcggagtaaggctcaaagcggtcgctccgtccattcatatgatcaaagtggatgtggaaagtgaattcgcgccgatcatcgggacggaaaaacaaagtgaagaacttgtccgctacttaatgcaggactttgaagatgatccgctttctatctggaactccgatattttcggcagatcattgagctctatcgtaagagaaggaatctccgcaaaactgtcactcatgccggaaaatgcgagatataaactgaaagaaacgctggagagaattattaacgaaggctcaggcggcctgatcgccattattttgtaagctgaaggacctcttcctgaaacggggggtctttttttattctttttagatactggaaatcaatcaaggattaggaggaaaaaagcaaaaaaaggaatatttgttcggtaaaacacgtgaaaaccttgacgagcaagggattgaggctttaaaatgcttgatatggctttttatatgtgttactctacatacagaaaatcttcactttgttggacaaacattcctcaaagtgtctgttttcttttgaaaagccgtttacttgtctgttcttccctgctttgattttttatcagacaggtttagaatcaggctgaactgtgaagaaatgataataaactgctgatttgatacccttttgggaggaggtgaaaggcatgaacaagacagaactaatcaatgcggttgctgaagcaagcgaattgtctaaaaaagacgctacaaaagcagttgattctgtttttgatacgattttagatgcacttaaaaacggtgataaaatccaactgatcggtttcggtaactttgaggtgcgcgagcgctctgcacgtaaaggacgtaacccgcaaacaggtgaagaaatcgaaatccctgcaagcaaggtacctgctttcaaaccaggtaaagctcttaaagacgctgttgcaggaaaataattgtgaatatagatcgtgtatgcatctgatacatacactttgtttcttcacagaaaagccccttgataaaggggcttttcatatttaagcagcctcggtcaccgggcaggactttcgttttgcttttggcgcggcaaatgtgctagaatcgaaattaaatgtattcaatggtggaggacacagacaatgaaagaagttaataaagaacagattgaacaggcggttcgccagattttagaggcgattggagaagacccggaccgggaagggcttttagatacgccgaaacgcgtggcaaaaatgtacgcggaagtattctcgggattaaatgaagacccgaaagaacactttaaaaccgttttcggagaagaccatgaggagcttgttcttgtaaaagatatcgcgtttcattccatgtgtgaacatcaccttgttcctttttacggaaaagcgcatattgcctacattccgcgcggcggcaaagtgacaggcctgagtaaattggcgcgggcggtggaagccgtctcaaaacgcccgcagctgcaggagcgcatcacttcaacgattgcagaaagcatcgtagagaccttagatccccacggcgtcatggttgtcgtcgaagctgagcatatgtgcatgacgatgaggggcgtaagaaagccgggtgcaaaaacagtgacttccgctgtaagaggtatttttaaagatgacgcagcggcgcgttccgaagtgttagaacatattaaacgtgcggattaataatgatagagggtgcagatatgaattcaaagcattcaagtgattttgtcgtcattaaagcggtcgaggacggcgtgaacgtcatcggtttaacgagaggaacggatacgaaatttcaccattccgaaaaactggacaaaggcgaagtgattatcgctcagtttactgagcatacctctgccatcaaagtgagaggcaacgccctcatccagaccgcttacggagaaatgaagagcgaaaaaaaataagccggctgtttcccgcttttgccaaatgcccgcaaacggcgggagaatacagccaatttcttttttttatgctataatgatacctgcgtataataatgacgagtaaatctcatacatattagaataaatgtgaatttggggacaagggtgatatttttgcaagacatctacggaactttagcgaatctaaatacgaaattaaaacaaaagctgtctcatccttatttagcgaaacatatttctgcgcctaaaatcgatgaggataagcttcttctttttcacgctttgtttgaagaggcggacattaagaacaacgacagagaaaattacatagtaactgcgatgcttgtccaaagcgcccttgatacccacgatgaagtgacaacagccagagcgttaaagcgagacgaaaataaaaaccggcagctcaccgtgcttgccggcgactatttcagcggactgtattattcgcttttatctgaaatgaaggatatctatatgattcggacgctcgctacggcaattaaagaaatcaatgagcataaaatccgtctgtacgatcggtctgtcaatgacttgaatcaattgatcgaaagcatggcgattgtggaagcggccctgtttcacagagtgtcagaccactttaatcttccgcgctggaaagagctggcgagtgatttttttgtatataagcggctgatgaacggcaatgctatatttctcgatgtcatcggcaatattgtaaagtcagggaaatcaaaggctgacataatggaagatagcttccgaaaggcaaagcaaagcattgaaacgctgctgccgctcaattcaccaatccaaaacctaatgctgaaccggcttaaagcgatcagccaggacaaaacatatcatcagaaagtggaagaagggtaatcaacatgcaggagtcaaaagaacagcgcgtacacggcgtgtttgaaaaaatctataaaaattatgaccaaatgaactctgtcatcagttttcagcagcataaaaaatggcgcgataaaacgatgcagatcatgaatgtaaaagaaggcgcaaaagcgcttgatgtctgctgcggaacggctgactggacgattgccctcgcagaagcggccggaaaaagcggcgaaatcaaaggactggatttcagcaaaaatatgctgagcatcggtgagaaaaaagtgaaagagggcggttacagccaaattgagcttttgcatgggaatgcgatggagcttcctttcgctgatgattcttttgattttgtcaccatcggcttcgggctgcggaacgttcccgactatctgaccgtgctgaaagaaatgcggcgggtcgtcaaaccgggcgggcaggtcgtatgtctggaaacatcccagccggaaatgttcggattcagacaggcatattttctttattttaaatacatcatgcctttcttcggaaaaatgtttgcgaagagctataaagaatattcttggcttcaagaatcggcaagagaatttcccggtatgaaagaacttgcgcgtctgtttgaagaagcgggcctgacgaatgtcaaataccattcgtttaccggcggagtggccgctacgcatatcggttggaaatgatgaatatacagatgtttgggtgaatgatatgaaatttaaaatggcctattcttttttaaatgacgatattgatgtgatcgaaagggagcttgagcaaacggtgcggtcagactatcccttgctgagtgaagccgggctccatctgctccaggcgggaggcaagcggatccgccccgttttcgtattgctttccggcatgttcggcgactatgacattaataaaataaaatatgttgcggtgacgctggaaatgattcatatggcgtccctcgtgcatgacgacgtcattgatgacgccgagctgcggaggggaaaaccgaccatcaaagccaagtgggacaaccgcatcgccatgtataccggtgattatatgcttgcgggctcacttgagatgatgacgagattggatgagccgaaagcccaccgaatcctgtccaaaaccatcgtagaagtatgcctcggagaaattgaacagatcagagataaatacaatatggaacaaaacctcagaacctatttgcgccgcatcaaacggaaaacggctcttctcattgccgtcagctgccagctcggcgccatcgcttcgggagctgatgagaagattcacaaagcattatattggttcggttattacgtgggcatgtcctatcagattattgacgacattcttgatttcacttcaacggaagaggaactgggaaaaccggtcggaggggatctgctgcaaggaaatgtcactctgcccgttttgtacgcgctccgtcagcctgaattgaaaaatcagctgaaattaattaacagtgaaacaacacaggagcagctcgcccccattattgaaaatattaaacgcacagacgcgattgaaaaatcaatggccgtcagtgacaggtacttaaaaaaagcgtttgaaaaactgaatacactgccgagaggacgtgcgcgctcatcattggccgccatcgccaaatatatcggcaaacggaaattttaaattcctttttacgaacaagatgtgaacattctccgccctggattgattaattgtcagaaagatgttacgatttcggtgtgcaacttgaaagcctatacataatgatggggtggagaatcttatggaaaaaacttttatcatggtaaaaccggacggcgtacagcgccagctgatcggagagattttatccagatttgagcgtaagggcttacaattggcaggagccaagctaatgcaagtttcagaacagatggctgaaaaccattatgctgaacataaagggaagccgtttttcggcgagcttgtggaattcattacatcaggacccgtatttgcaatggtatgggaaggggaaaatgtagtagagatcacaagacagctgatcggaaaaacgaacccgaaagatgcactgccgggcacaatccgcggtgactacggcatgtttgtcggcaaaaatatcattcacggttcagactccttagaaagcgctgagcgggaaattcacattttctttaaacaggaagagcttgtaccgtatcaaaaattaatggccgactgggtgtactaaaccgtcagcctttctttttctcgtattatgaaaaggtttacatcatttatgaaagacagaggctgcgctgccctgtcttttcgtttctcacaaatcagcccgcgggctgatttttttattgaaatcgtacaatttcgacagaaaacaggctatactaggacaaaagacagcgagattgggagagaagcaatggagccttacgacatttttatcaccaagtggaaacaaataaccggcgttgatttatctttatacaaagaagcacagatgaaaaggcggctgacgtccctttatgaaaagaaggggttcagagattttcaggaatttgccgccgctttggaaaaggacaagcttttattaaacgaaacattggacagaatgacgatcaatgtttctgaattttaccgaaattataaacggtgggaagttcttgaaacctcaattcttccgttaataaagcataacaaaccgttaaaaatatggagtgcggcctgttcaacgggagaggagccctatactttggctatgattctcaatcagcagacgggactggccggatttgatatattggcgacagatattgatgaaaaggcgctaagcaaagccaagcggggcatctaccaggaacgctcgctgcaagaggtgccggcttccgtgaaaagccgttatttcaccaagcaggctgacaacagttatcaagtaaaacaagagattcagaacaacatccggtttaagcggcacaacctgcttgccgacagctatgaacaggattttgatctgatcgtctgccgcaacgtctttatttattttactgaaaaagcaaaagaagagctgtatgtgaaaatggcgggcagtctgaaaaagaacggaattctgtttgtcggcagtacagaacaaattttcagcccggaaaaattcggccttgagagcactgatacatttttttatcaaaaaagatagaagacatttaatgaaaacttgtggtatagttttacttaaaagcgttaatgcgatgaagggagaagaaagaaatgagatacttaacagccggagaatcacacggtccgcagctgacgacaattatagaaggtgtgcctgcggggctttatataactgaagaagacattaattttgagcttgccagacgtcaaaaagggcacggccgcggacgccgcatgcagattgaaacggacagagcgaagatcacaagcggcgtgcggcatgcccggacactcggttcacccatcgcgctcgttgtagaaaataaagactggactcactggacaaaaattatgggcgccgcaccgattacagaagaagaagaaagtgaaatgaaacgccagatttcaagaccgagaccgggacacgcagatttgaacggtgctattaagtataatcaccgtgatatgagaaatgtgttagaacgatcttccgcgcgtgagacaacggttcgcgtggctgccggagccgtcgctaaaaagattttagcggagcttggcattaaagtcgccggacatgtcctgcaaatcggcagcgtaaaagcagagaaaaccgattacacatccatcgaggatctcaaacgggtaacggaagaatcaccggtcagatgctacgatgaagaagcaggccgtcaaatgatggcagccattgatgaagcgaaggcaaacggcgactcgatcggaggaatcgttgaagtgatcgtcgaaggcatgccggtcggtgtcggaagctatgtccactatgaccgtaagctggacagcaagctcgctgctgccgttctgtcgattaacgcgtttaaaggcgtagagttcggcatcggttttgaagcggccggcaaaaacggcagtgaagttcatgatgaaatcgtatgggatgaagagaaaggctatacacgcgccacaaacaggctcggaggattagaaggcggtatgacgacgggaatgccgattgtcgtccgcggcgttatgaaaccgatccctactttgtacaagccgctgaaaagcgtcgacattgaaacgaaagaaccgtttacagcgagcattgaacgttcagacagctgcgcggttccagcagcaagtgtagtggctgaagcagcagtggcctgggaaatcgcaaatgctgtcgtagaacaattcgggcttgaccagatcgaccgaattaaagaaaatgttgaaaacatgaaaaaattatcgagggaattctgatgaaagagcttgaggttcggacagcttcctccgcatatccggtgtatatcggtgaaggcataaggaaacaggccgctgcccttttgtcttcactgaacaggccgctgacaaagatccttctcatcattgatgctgaagttgaccggctttacggtgatgagatgttccggcttttaaacgaaacatggtccgtgaaaaaagtgatcgttccaagcggagaagaagcgaagtctctaaaagagtatgaacggattcaaacggaagcgatcgctttccatatggaccgctcctcatgtatgatcgccttcggaggcggcgtgacgggtgatttggccggcttttgcgcagcaacttttatgcgcggaattgatttcattcaaatgccgacgacactgcttgcccatgacagcgcggtcggcggcaaggtggccgtcaaccataaactcggaaagaatttaatcggcgcgttttatcagccgaaagcggtgatttacgatacggagctactgaaaaccctgccggaacaagagctgagatcgggcatggctgaagtgatcaaacacgcgtttatcgccgatcatgcttttttagaaaaacttctcacgtttgacacgttgcaaggactgacaagcgctgagctgaatgaaatgatttataaaggaatttcaatcaaatcggccgtcgtgcgtgaggacgaaaaggaagaggggataagagcttttctgaatttcggccatacgctcggccatgccgttgaggcggaatacggctacggacggattacacatggagatgcggtcgccctcggcatgcagtttgccctttacgtgagtgaacaggttgcgggttgcaagatgaacaggaaagaactcacacaatggctgattgggctcggctacccgggaagcatcagacaagatattgaaacgccggttctctccgctcggatgatgaatgataaaaaaacgcgcggaggcatgacacagttcatcgtgttaaaagaattaggcgaagcgcgggactgcatgctttcaaaagatgagctcgaaaatttgctgaacaaatggcgaatggaggaaacagcatgatgatacgcggcattcgcggagcaacaacggtggaacaagacaccgaacaagaaattttagaaaaaacacagcagctgcttgaaaaaatcattgaacaaaatggatgcaagccggaagacgttgtacagatcctgttatccgccacgcctgatatccattccgtatttccggcaaaagcggtccgccgcctttccgggtggcagtacgtcccggtgacgtgcatgcaggaaatggatgtcaccggcgctctgcaaaagtgtatccgtgtcctgatgacggttcagacggatacgcctcaggatgaaatcaagcatgtctatttagaaaaagccgttgtgttaaggccggatttatcattgacaaaaaatactgacatgtaatacgataaacaaagcttagaaatacacaagagtgtgtatagagctggtaagtaagacattgaacagttgagtttagaatagggtagcagagaatgagtttagctgagctgagataaacacgtttttattctgcccaaaagaagcctttcttttgggtttatttcttatacgcaagactcctctcactcttcatctcattctccttaccgtaaggaggagaatcatgaatttacaatcggatgtttctttatttttaaaggacagtctgacacaccgcaccattccaatcgcagaaacttttacggtcgacacgatcacacccattcagatggttgaaaaactggacagaaacattacgtatcttttagaaagcaaggatgagtcgtcaagctggtcgagatactcttttatcggccttgatccttttatcaccattaaagagagtcataacacattcactgccgctgatccaaacgggcatacgctgtttgaagccggagaattaaaagccgtgcttgactggatgaatgagagcttccgcattaaaacacccgagcttgatatcccattttcgggaggggcggtcggttatctgagctatgacatgattcctttgattgagccttccgtgccaagccacgcgaaagtaacagatttcgaaaaatgtatgctgtttgtctgccggaaaatcatcgcgtacgaccacgaaacgaaacaagtgcatttcattcaatatgcggagcttaacggccgggagacggaggaagaaaagcgggccgtttttaaagaaaattgcgcggagcttcgtaagcttatcggtattttgacagaatcgaaagatatgaaagagccgtttttttctaaagaaacgtttgacacgccaagttttgccgctgtgacatccaattatacgaaagaagagtttatggccggcgttaataaactgaaagaatatataaaagcgggagacatttttcaaggggtgctttcgcaaaagtttgacattccggtatccagacattcatttgagctgtacagggtgctccgcatcgtcaatccttcaccttatatgtactatatcaaactgcctgacagagacattgtcgggagttcgcctgaacgtctgatccgcgtgcatgacaggcacctggaaattcatccgattgccggaacgagaagaaggggcgccggaaaagaagaggatgaacgcctgaaaaaagagctgatgaatgacgaaaaagaaaaagctgaacattacatgctcgtcgatcttgcgcgcaatgacatcggcagagttgcggagtacggttccgtagccgttccggaattcacaaaggtcgtttctttttcacatgtgatgcacatcatctctgttgtaaccggccgtttaaagcagggcgtccatcccgttgacgcgctgatgtcggcattcccggcaggaacactcacgggcgctccaaaaatccgcgcgatgcagcttttaaatgaattagaaccgacttccagagaaacctacggcggatgtatcgcttatatcggatttgacgggtcaattgattcgtgtattaccatccgcaccatgagtgtcaaaaacggtacggcgtcggtgcaggcgggcgcgggaatagtcgccgattccgtcccggaagccgaatatgaagagagctgtaacaaagcgggggcgcttttaaaaacgattcaaattgcagaagacatcttttctggcggggaggagaagacggatgaacaaatttctgcaatcgtgcgttaatggccgtacgctgaaaaccggagaagccgaaaagctgatggagatgatgatgaacggggacatgtcgcagtctgagatcggcgggattttatcggtgttagcccaccgaggtgaaacggcggaagagcttgccggatttgtaaaagtgatgcgggcgcgggcacagacatcaggtggcttggcggatgtcgttgatacgtgcggaacaggcggagacgggatttctacgtttaacatatccacggcagcggcaattacagcttctgccgccggagctaaagttgccaagcacggaaatcgctccgtttcgtctaaaagcggcagcgcggatgtgctggaaaagctgggggtttccattcaagccactccagaaagcgttaaacgcagcattgaaatgaaacaaatggggtttttgtttgcgccgctgtttcattcgtcaatgaagcacgtcgccgccgcaagaaaagagcttggctttcgaaccgtatttaatctgctgggcccgctcagcaacccgctgcaggtgaagcggcaggtgatcggcgtctattcatttgataaagcgcgcctgatggcaagcgctctggaacaatttgatgtcaggcacgtcatgcttgtgtcggcccgtgacggattagatgaactgtccatctcagcaccgaccgatatcattgaactgaaaaacggtgaacgtctggaatattccgtttcacctgaacaattcggttttacagaaggttcactaaaggatattcaagtgagttcatcggaagaaagcgcgctcctcattcagaatatttttgcaaataaagctccgtcatccgctctgcatattaccgccttaaatgcgggcgcggccatttatacggcaggtcttgcaaatgatctgaaagaaggaacgaaaaccgccttagaagcgattcaaaacggagatgccaaaaggcagctcgaacgtctgaaacagaaagaggaagaaatgtatgcttgatcaaatcattcagcagaaaaaagaagaaatcaaatccatcgtgctgccggaaacctgtcaaattgaacggagatcctttaaagaagcgctcctgaacccgaaccgttttatcgggctgattgccgaagtgaaaaaagcttcgccgtctaaaggattgattaaagagcattttgttccggaaacgattgcggcggattatgaagcggctaaagccgacgccctttcggttctcacggatacccgtttttttcaggggagaaatcaatttctgacagatgttaaacaaaccgtgtctcttcctgtcctgagaaaagattttattattgattcccatcaggtggaggaatcgttcaggatcggcgccgatgccattttgctgatcggggaagcgctggaaccttcagagcttcatgagctttatctggaggcccgcgagaagggcatggacgtgctcgttgaagtccatgatgaaactgtgcttgaacggattttacaagtgtttcagccggacattctcggcataaacaaccgggacttaaaaacgttccgtacttctgtttcgcaaacggaaaaaatagcccagcttgtaccggacggctgcctgctggtcagcgaaagcggcatcggttctttggctgacctgcaattcgtcaacaagcacggggcgcaggctgtattggtcggagaatccttaatgagagaggattcgcagcaaaaggcgatccgcggactgttcggggagtgatgatatgaaaaagcctgaggtaaagtactgcgggatacgatcgaagcgtgattacgaacttgcggcagcttcaggagcggattatctgggatttgtttttgccgcaagcaaacggagagtaacgccggatgaggtccggaaatggaaagagcaggtccggacagacaagaaacatgtcggagtatttgtaaatgaaacgatagaaaacatcgcgcaaatcgcctctgatctggcacttgacgccatccagcttcacggagatgaatcgcctgaggatgccctccgtctccgtccgcttgtgcgctcggagatatggaaagcgctccatcacggggaagggacgcttcgtcagatggctcaatttgcacctgctgtcgacggctatgtcattgattcttcagtaaaaggaatgagaggcggcacgggaatcgcgttttcgtgggctcgtgtccccttgtaccgaaagcaggctcaaaatgcaaacaagcgctgttttattgcgggcggcgttaatcctgaaacgattaccggcttactgagatcgcgtccgtgcggtatagatcttgccagtggaattgaaaaaaacggacaaaaggatcaaacactgatccggcttttagaagaaaggatgaaccactatgtatccatatccaaatgaaatcggaagatacggcgaattcggcggcaaatttgtccctgaaacattgatgcggccacttgaggaaatcgagacggctttcaaagaattaaagaatgatcccgtttttcatgccgaatataaaaaactactgtttgattactccggaagaccgaccgcattaacgttcgcagacagggtgtcagagtatttgggaggggcgaaaatctatctgaaaagagaagatttaaaccataccggctctcataaaattaacaacgcgttaggccagattctgcttgccaaaaagatgggcaaaacgaaaatcatcgccgaaaccggtgcgggacagcacggtgtcgctgccgcgacagccgccgcaaaattcggttttaagtgtacagtttttatgggtgaagaagacgttgcacgccagtcgctgaatgtattccggatgaaactgctcggcgcggaagtggtgccggtcacaagcggaaacggcacgctgaaagatgcgacgaatgaggcgatcaggtattgggtccagcattgtgaagatcatttctaccttatcggttctgtagtggggccgcatccgtatccgtatatcgttcgcgaatttcagaaaatcatcggcgaggaagcgaaagaacagctccgccgggttgaaggaacgctcccggataaggttgttgcatgtgtcggcggcggaagcaatgcgatgggcatatttcaggcctttttagacgaagatattgagctgatcggcgccgaggcggccggaaaaggaattgatacgccgctgcatgcggcaacgatcgcaaaagggacactcggggtgattcacggttcaatgacctatttaatacaagatgaatacgggcagattatcgaaccgtattccatttcagccggccttgattacccggggatcggccctgagcacgcctatctgcataaaagcggccgtgtaacgtacgaaagcgtgacagacgatgaagcgattgccgcgttacgtctgctttctgaaacagaaggtattcttccggctattgaatctgcccacgccctggcaaaagcgtttgaaatggcaaaagacatggataaagacaaaatcattctcgtcagtttgtcgggaagaggagataaagatgttcatacgctgatgaatgttttggaaaacggggtggagacacatgtttaatctgcgagattctgaaaaattatttatcccttttattacggctggcgatccgcttcctgacatttctgttgagctggcaatatcattgcagaatgcaggcgcttctgcccttgaaatcggcgttccttacacagatccgcttgcggacggacccgtcatacaacgggcttcaaaacgggctctggaaaacggaatgaatatcgtaaaagcaattgaacttggcggcaaaatgaaaaaaaacggcgttcatattccaattatcctctttacgtattataatcctgtgttacaattagaaaaagaatactttttcgctttactgcgggaaaacgacatagacggtctgcttgtacccgaccttccattagaggaaagcgcccttttgcaaatgacatgcaaaaaggagaacatcgcttatatctcactggttgcgccgacaagtgaagaccgtttgaaaataattactgaacaggcctgcggctttgtgtattgtgtatcctctttaggagtgacgggcgtacgcagcgaattcgatccgtctgtatactctttcatacgtaaggtgaaagaattcagctctgttccggtggcggtcggttttggcatttcaaaccgcaaacaggttgacgggatgaatgaaatatctgacggtgtcgttgtcggcagcgcgcttgtcaaaaaagttgaagagcttaaaacaaagcttgtgaatcccggtacaagagccgatgcgcttcttgaatttgaagaatacgcaaagacgttcggacgactgtacagtgtaaaatgaggtgactggatttgcagattaaagaacagctgcggcagctgaaaccgtatcagccgggcaaaccaatagaagaagtgaaaatggaatacgggcttgagaaagtagtaaaactcgcttctaacgaaaatccgttcggctgttcacaggccgctaaagatgcgctgcatcaggagattgagcagcttgcgctgtatcccgacggttacagtgccgctttgagaacacggctcagtgagcatctgcaggtcagtgaatcttcgatcatttttggaaacggctctgatgagcttgtgcagattatctgccgttctttattaaatgatcaggcaaacacgattaccgccgccccgactttcccgcaatacagacacaatgcggtgattgaaggcgctgaggtgcgcgaggttccgctccgcagtgacggcgctcatgatttggaccggatgctggaagcaattgacggcgagacgaaaatcatatgggtatgcaaccccaataatccgacggggacatatacttctgagcaagagctaattgcctttttaaacagagttcccgagcatatactcgttgtacttgatgaagcgtactacgagtatgttacggcggaagattacccagaaagcattccgcttttaaagcaatatccgaatgttatgatcctccgcaccttctctaaagcgtacggacttgccgcgctgcgcgtcggatacggcattgcggacgaagcactgatccgtcagattgaaccggcgagagagccgttcaatacgagcagaatcggtcaggcttcggcactggcagcgcttgatgaccagacatttattcaggaatgcgtcgagaaaaataaagcaggccttaagcagtattatgattttgcagaaactcacggattaacttgttatccttcacaaaccaactttgtgctcattgattttaaccgcccggcggatgaactgttccaagccctgttggaaaaaggatatatcgtccgctcaggacaggcgctcggatttccgacagcgttaaggattacggtcggtacgaaagagcagaatgaggaaattctcacaattttagctgaaatattataagaggtgatcaggcatcacctctttgctctattaaaatagttgaaaaaggaaatgagtgaaatgaaggatactatattgcttgcggggatcgggctgatcggcggatcgatcgcattggccatcaaaaaggagcatccgcataaacggattatcggtgtggatatttcggaagaacagctcactgccgcgctgaagctcggaattattgacgagcgggccggctcatttacggaaggggcgcagcaagcgtctgttgtcattatcgccactcctgtcgcccaaacgctgaaaatgctcgatgtgctggcggcatcagacatcacccatgaactcctgattacggatgtgggcagcacgaaacagaaagtcgtcagctacgccgacaaagtgcttccggctcactatcaatttgtcggcggccatccgatggcgggatctcataaatccggggccgctgccgcgaaagaatttttattcgaaaatgcgttttatattttaacacccggaaaatcaacttctaaagagtcagtaacgcatctgaaggaactcttgaaagcggcaaacgcccactttgtggagatgacccccgaggagcatgacggcgtaacgagcgtcatcagccatttccctcatatcgttgctgcaagcctcgtacatcaggctcatcatgctgaagaagattatccgtttttgacacgtttcgcagccggcggttttcgggacatcaccaggatcgcctcaagcagtccggcgatgtggagggacatacttcttcataacaaagataaactgcttgaccgcttcaaagaatggaaacgggagattgacacgatcgaatcttatgtagaaaatgaagatgcggacagcctgttcggatattttaaaaaagcgaaagattatcgcgacggtctgccgctccgtcaaaaaggagcgatcccgtccttttatgacctttatgtcgatgttcccgatcatccgggggtcatttcagaaattacggcgatattggcagaagaaaaaatcagtatcaccaacatccgcattatcgaaacaagagaagatattaacggaattctcagaatcagtttccagactgatgatgaccggaagcgtgcggaaatctgcattcaatcccgcgccaaatatgacacattttacgctgactgaggtggaaaacattgaaaagagaaaaagtgacgtctttaaacggtgaaattcatattccgggggataaatccatctcccaccgttctgttatgttcggagcgcttgcggaaggaaccacaacggtaaaaaactttttgcccggagccgattgtctgagcaccattgcctgcttcagaaaaatgggtgtctccattgaacaaaacggaagtgatgtaacgatatacgggaagggcattgacgcactttgtgagcctgacagccttcttgatgtcggaaattccggcacgactatccgcctgatgctcggcattttagccggacgcccatttcacagtacggtagcgggcgacgaaagtattgcaaagcgcccgatgaagagggtgacggagcctttaaaacagatgggagccgcgattgacggaagagcggacggaggatttacgcctttatccgtaagaggcggacaattgaaaggcattgattacgtctcccctgttgcaagcgcgcagatcaaatccgccgtgctgcttgccggattgcaggctgaagggacgacgaccgtcactgagcctcataaatcaagagaccatacggaacggatgctgaacgcttttggcgccgagcttgcggaaacggagacgagcgcttccgtaacgggcggtcagaagcttcagggggctgatattttcgtgcccggcgatatttcttcagcagcctttttccttgcggcaggcgctgtcgttcccggaagccggattgtgctgaaaaatgtcggcctgaatccgacacgcacgggaatgattgatgtcttaaagcaaatgggggcttcacttgaagtgattccttcagaagcggacagcgcagagccttacggagacctggttattgaaacttcagatctgaaagcggcagaaatcggcggagaaatcattccccgtttaattgacgagatcccgattatcgcccttttggcaacgcaggctgaaggcacaactgtcattaaagacgctgcggagctgaaggtgaaggaaacgaaccggatcgacaccgtcgtatcagagctccggaaaatcggcgcagacattgaaccgactgaagacggcatgaaaatacacggcaaaaaaacgcttgcgggcggagccgatgtgtcaagccacggtgaccaccgcatcggcatgatgctcggtatcgcttcatgcctgacagaagagccgattgacatccgtgatactgaggcaatccatgtctcatatccgacattttttgagcatttagatcaattagccaaaaaagcctgaagacgattcttcgggcttttttcttcatgtgtcataaaactttgggctttgacatagcttgtcttaaacagaaaaataaaagaaagggggaatgcgttttcgttacagaaacagccggaacaaattgcgctgtttgcgtataaagataccgtccccttttttgccgttttcctcttaaccattttctgataaactataatgccgggtgaagcatcttatttgcgggcaggccctgtctgaattatgataagaataacccgaataaaaacccttttcattggttgatgaggtataggaaaagaaaggaccggtctgatttgaatacattgatccaagaagccataaaattagttgaagcaggtgaaaccgaaaagggactcaaagcgctttcaaaagctgaaacgcagcttcatgacgaagacaaagccattgcagcccagctctactatgaatggggaaacgccgaaaaagcattagcgctgatcagtgatctgcatgacctttatccggatgagtctgagctgacgaatttttacgccgaattgttaatagatattgatgaagaagaaaaagctcttgaggtgctggagacaatttctccggaagacccgtcttacgcggaaagccttcttttaatggctgatctgtatcagatgcagggcttatttgaagtaagtgagcaaaagctgttacaggcgaaagcgatgttacaagatgaacctgttattgatttcgctctgggggaattatacttcactcagggatcatacgcaaaagccgttccttactatgaagagacggcaaaagaacggcacgaaatcggcggcgtaaatgttcatcagaggctggctgagtcattgagcgcggcgggtgaatttgaggaagcgatttcatggtatgaaaaagcggtcgcagaacatacagaaccgaacacgatttttgggtacgggttcacagcctatcaggcgggaatggtcaaaacagccatcaagcagctgtctgatttaaaagggcttgatccttcctattcatcgctttatatgccgcttgcaaaaagctacgaggcagaaggcatgtatgaagatgcattaaaaaccgctaaagaaggtattacttacgatgaatacaataaagagctttttctctatgcggcgaaaatggcgttaaagctcggcagcgaagaggaaggcaaaaagcttcttcaggaagcgctggcgctcgatccgggttacgtggaagcgctccatacgcttttagccgtctatcataaagaagaaagctttgaagagattattgatctgattcaggaagtccgcggctacggagaagaagatccgaaatacaattggtatttggcgggtgcttatacaggccttgagcaatacgctgaagcgaaaaaaagcttcgaagctgcgtatctccattatcaggatgatcgggatttcttatatgaatacgctcacttcttattggaagagggtctccagaaagaagcgctgccgcttttaaagaaagtgctttcaatggatggaacaaacgaagagcttgaagaaacaatcttacggatagaggatgaatttttaagataagcaggattttggaccatgcttgctgaatgtataagtgatgtcagattatacgatcgatagaggagggaattacatgcagacccctgtttctgtcaatgaaaaaaaggattttatccgttggtttttaaatcattatcagcttaaacgccgggagtgcgtctggattttaaattatttaatgagtcatgattcattaatggaaaaagtccattttgtagaacaagccgaattttgcccgagaggcattatcatgtctactcattgcgttgatgaggtgccgtttaggttttacaaagaaaatgtcatgactacggacgcggaaaaatcttttcacgacatccggttaaataaacagcaggatttatttatccagctgaatttccgttcggcctacagctcaccggaatatgccgctgttcttgaattaaatccgcatctgccgaaagacctgtttgaaaataaacaggatcaggggatggccgaaaaaatattagaacatgccatttccactttccagcgggaaaagctgcttaaagatatcgacgaggcgctggaccgccacgacaaagaaacatttgaaaagctttcccgccaattgaatcagctcacataaatgacagccttgcagaatatgcaaggcttgttgcgtaaagaggaggaacgagacatgagatggagggccgctgatgccgatgcctatttacaatctgcggattacattgataccgctgtcatcccgttaatttccataacatcttcaggaggcttaaaagaggccgttgaacagggggaaagcacccaattgctttctgaagagcttgagcgccaattgaagggacgggtatatttattcccctcttatacatatgttgatatagaccaatcacaaatcgccctgcttcaaaaactcaaagacgaggtgatgaccaactttcgccacgccttgttcctgacggcagacgaaaaatggaaggattctgaattagggtctgatgtcatatacatacctgccgttccgtttgaacatatgaaagactctttaaagagaaaaatagcggatgataagtgcggagaaattttgaacgttttgttacagaagtggaacaattcttaaaaacaccaggcatcccgcaaaacacccgttttgcctctgttgaccttgctgaaagattcatatattatgagggtgtcaaatctcagaattattttctattttagttaatttttggtcaatctttagggggggaagagatgggcggaaaacaagatatatcaagaagacaatttttaaactatgcgctcaccggcgtggggggatttatggccgccagtgcgcttatgcccatggtccgttttgcgctggacccggtattaaaaccgacgggagatcaaaaaatggtgcaggttgtcagtgtggatgagctgacgaaggagccgaagcggtttgactttaaaattcatcaagtcgacgcctggtacgaatcggaagaatccaggtcagcctgggtttacaagcatggggatgaaattatagcgctttctccgatctgtaagcatttgggctgcaccgtaaactggaacaatgatcctaaaaatccgaacaagttcttttgtccctgccattacgggctgtatgaaaaagacggcacgaacgttccgggcacgccgccgctcgcgcctcttgaccgttatgagcaaaaagtaaaggacggctttttgtatcttggaaaagcaaagcctaggggggaagggtgacatgctgaacaaaatttatgactgggtggatgaacgtctcgatattacgccgatgtggcgggatatcgccgaccatgaagtgccggaacatgtaaatcccgctcaccatttctcggcttttgtctattgtttcggcggtttgacgttttttgtaaccgttatccaagtgttgtccgggatgtttttaacgatgtattatgtgccggatataaaaaacgcgtgggaatctgtgtattatttgcagaatgaagtcgctttcgggcagattgtaaggggtatgcaccattggggtgcaagtttagtcattgtgatgatgtttttacatacgctgcgggttttctttcagggagcttataaaaagcctcgggaattgaactggatcgtcggtgttctgatcttttttgtgatgctcggtctcggttttacagggtatctgcttccatgggatatgaaggcgctgtttgcgacaaaggtaggtcttcagattgcggaggcgacgccattgatcggagcgcaggtgaaaactcttcttgccggccaccacgatattgtcggcgcccaaacgctgacgagattttttgcgattcacgtattttttctccctgccgctttgtttgcgctcatgggcgcccactttgtcatgatccgcaagcagggaatttcaggaccgctttaatacaaatctgatataaaagggaggggatgacatgcaccgggggaaaggaatgaagtttgtaggagattcaaggataccggctgaaaaaaaaccgaatataccgaaagactattcagagtatcctggaaagacagaggcgttttggccgaacttcctgctgaaagaatggatggtcggggccgttttcctcgtcggatttctcgttttaacgattgtgcacgagccgcctttggaacgggtggcggacccgacggatacagggtatattccgctgccggattggtattttctatttttataccagcttttaaaatatgaatatgccgcagggagctacaccgttatcggcgcgatgattataccgggtcttgccttcgggtcgctgcttttggctccgtttctcgacagggggtctgaaagaaggccgtggaagcgtccggttgcggtcggcatgatgcttttggcgctttgcgctacggtctttttaacgtggcagtcagtcgcgacgcatgactgggcgaaggcggaggagcaagggaaaatcaaaaaagaagccgccattgatactgaatcagacggttataaggtatttaaagaacaaggctgtatttcctgtcacggggataatcttcaaggcggaagcgccggtccgtccctggtcgataacgggctgagcccggaagaaattaaaaaaatcgccgtcaaagggaaagggcagatgccagccggtatttttaaagggaatgacaaacagcttgatcagctggcgaagttcatttctgaaacgacagcgaaataacgtattgtgaagtagacaatagcaggatatacttttatgaaaagagctgaccggatgtcagctttttttgcatgatacatactttttacggactgagagttgatggtatgaggtggatttcttatcttttagggttgcgcggcatgcttctgcttgttcttgccgttaattttatcggtacggtgtacggctattattggtatgtgcctcagcttgcggacacgccgttccgatttctgatatttgtgcctgacagcccgacggcgacgtttttcttcctgttcgtgcttctgtcatttctcatgggaagaaacgcgccgctgtttgaagcgctggctcttgtaacccttgtaaaatacgggctgtgggcggtcggaatgaatgtctttgtgctggtcaaaatggggcagatgcctttggaagggtacatgctgattgcttcacattttgccatggccgttcaaggcgttttatacagcccgtattttcggttccggttatggcatcttgccgttgccgctgtttggacgcttcataatgatgtcattgattatcttttcggcatgatgccccgctactcaatgctcaatgactatatgcaagagatcggctatgctacattctggctgagcatattttcactcggccttgcatactatttggtgatttctaaaagacggataaagcttgacttacactgatagaatcttggtctaaccttgtcccgctcctcatattctgtaaagagaaggagtgggagggacctctatgaaacgaaagctgacgatctgtcttttacttgctcttatgtgtttcatcacaactgccaaagctgaagatgagggcggtctcaaggaactgaacgacctttcggataccgttttccaaatgacgcggcattcgcagtatgatgaggctctgcaagtgcttggctactttaagaaaaaaatgacacacgtaaactcactgagcggcgccgaagtcaggcaggtgactctgggtttcaatgatttagtgcgcgttctgaaacaggcagacgcctcagataccgaaaaaatccgggcagccgcccagttcaggttggtaatggatgcgatggaagaccactccgatccgctgtggggttcgcttgaaagaccgattatggcgacattcagcgccttaaaagaagatgtcagcggaaacggaagtgaaaatttcaatgaaaagtggaatgaatttatatcattatatgatttaatttatcccagcctgacaatggatgtgtcggccggccagcttgatacggtggcgaaacatatcgaggtgattgagcaggacgggtttcagcagatgacaaaaggaacaaagcttgagcgtctgacgctcctgcaacaggatttaaagcgggtttttgacaaggtggagcgggatgacgctgacccttcgctgctctgggtcattctgacaacaggcggtatcattattactgcgctgacatatgtcggctaccgaaaatacagagcggaaaaaaagaaagagaaaaagcgtgagtatcctaagtctaaataaacacaaattgctgtaaaggagctaagccagtgaaaaaactcatccagcaattggcttcaaaacacctcccgcagccgatcagaggcagaaaaggggcgactgacgaaggaccgcgaaacctcgcgcgtgacttccagaatcctgacatgctcgttccgccttcaacggatgcaggaacggttcaaaacttgaaattctcattttctgatacgcatatgaggcttgaagacggcggatggtccagagaggtgacggtcagggaactgccggtatccaaaaacatcgcggcggtgaacatgagactgaagccgggagctgtgcgggagcttcattggcataaagaagccgaatggggatatgtgattaacggaggagtccgtttaactgcggtcgatcaaaatggaaggaattttattgacaacgtaagtgaaggggatctgtggtattttccttccggcattcctcattccattcaaggattagagcagggcagtgagtttttgctcgtctttgatgacggctctttttcagaaaacagcaccttttcagtaacggactggtttgcccataccccgcgcagcgtgctggaggcgaacttcggtgttcccggatatgacttggcctacattcacaagaaagagcgttacatgttccagctggaaccgcctcccccgattgaaaaggcagcagtttcttccccggaaggcaccgttttggagccgttcagctacaagctttcccggcaggagccccttgttaccagcgggggaagagtaaagattgtcgattcaaaaacgtttaaggtgtcaaaaacgattgccgcagctctcgtggaagtcgaacccggaggcatgagagaattgcattggcatccgaatacggacgagtggcagtattatctttcaggagaagcgaaaatgacggtgtttgcggcggagggaagagcgcggacatttaactatcaagcaggtgacgtaggatatgttccttttgcaatgggacattatgttcagaataccggtgacaccgtgcttcgctttctggaaatcttcaaaagcgaccgttttgaagatgtctctttaaaccaatggctggcactgacgccgcagcgcttcgtcgagcagacgctcaatgtcagtccggcattcgcccgccgattgaaaaagaaaaaatcaccggttgtcaaatggaaacacaaacagtaaaggcggcaaaagccgcctttttattatcgtctgatcggatttttattttcatcaagcgtaaatccttcgccgagcacatcatgaacgtcgcttactgcaacaaaggcgtgcgggtcaacggaagtgatgacgcttttcaaaagcacaatttcgtttttcggaacgacgcagtaaagaacgtccctgtcttcttttgtataggatccctgtccttttaaaacggtgacgccgcgctccatctcttcaatgattttttgctggatcaaatcgtttttcgaagaaataatcgttgccccttttgcggcatagccgccttcctggataaaatcaatcaatctcgcagcgacaaaaacggctacaagcgtgtacatcgcttccttgtaagaaagatacgtaaacaaagaaagcagaatgacacaggcgtcaaaggcaaacatcgtccggcccatcgggattccgaaaaacttgttgatcagcctggcgatgatatcgaccccgcccgtcgtgccgccgtatttaaaaataatgccgagacccgcgccgataaatacaccggcgaacaaggcggccagcgctaaatcatgcgacagcggcatatgaatttcgtaacgctgaaaaacactcagaaaaacagaaagagagacggtgccgatcagggtatagacaaacatcgtccggccgagcatacgccagccgatgaaaaagataggaatgttcaataccaggttggaaatagaagggctgatgtggaataacgcatataaaagcagcgtaatgccggtaaatccgccttccgccaaattgttctgcatattaaagtgaaccagtccgaatgaaaaaacagcggcgccgattaaaataaagcaaatgtttttgattctgatttctccaagcattgcatcaaaccccttttccttccataagattgcgtaaatattatagtggatacaaaagaaaacagcaaactgccgtttttaacatttgtcaaatgtacttgaattagctaacatggaagagatgacaggaggtattcgcacagtgagtgacaaaacgatgaaagacttacaagctgaggtcgatgaatatatcggccaattcaaagaaggctatttcagcccgcttgccatgatggcccgtctcacggaagaactgggcgaacttgcaagagaagtcaaccattattatggggaaaagccgaagaaaacgacggaaaatgagaaaagcatggaagaggaaatgggcgatgtgctgttcgtcctgatctgcctcgccaactcccttgatatttcattggaggaagctcataaccgcgtcatgcataaatttaatacacgtgataaagaccgctggactagaaaagaagaaggaaagtaggagaaaccatgtcaaatgaaaccattaaagtcgtcattgccggaccaagaggcagaatgggtcaggaggccgtaaaacttgccgtccgcacgcctcattttgagcttgtcggcgccattgaccatacatacgatcagcaaacattgcgggaagtgatgtcagctgattcagacgctcttatttatacggatatccgcgcatgtttccaagaaacaaaaccggatgtgctgatcgatttgacaacgcctgaaatcggcaaaaaacatacgaaagccgctcttgaacacggcgtccgccccgttgtgggaacgaccggattttctgaagcggatttagaggagcttcaagccttgactgaagaaaaaggaatcggcgccatcatcgctccgaactttgcattgggcgcggtactgatgatgaagttctcacaaatggccgccaactattttgaagatgtagaaatcattgagcttcatcatgatcaaaagctggatgccccgagcggaacggcgctgaaaacagcggaaatgatctcaagcgtccgtacagaaaagcagcagggccatcctgatgaaaaagaaattctgccgggcgcccgcggtgctgaattaaacggcatccgccttcacagcgtgcgtctgccgggccttatcgcccaccaggaagtcatgttcggcatggacggccagacgctgaaactgcgccatgactcctataaccgggcttcctttatgtcaggagtgaagctgtcagtggagcaagtgatgaaaatcgaccagcttgtatacggactcgaaaatattatcgactgaatcggcaagggggagaacatcaaatgaaaatcgctttgattgctcacgataagaaaaagcaggatatggttcagtttacgaccgcatataaagatatactgagccatcatgagttatacgcgacaggtacgacaggcctgaaaatccaggaatcgaccggattgtccgttgaacgttttcaatccggcccgctcggcggagatcagcaaatcggcgcattgattgcggcaaatgccctggatctcatcatttttctgcgcgatccgttaactgcgcagcctcatgaaccggatgtctcggcgctgatccggctgtgtgacgtatacgcgatcccgctcgccacaaatatggggacagcggaaatcctcgtccggacgctggacggcggggcatttgatttccgcaatcttgtgcgcggaggagagccgaatgtctgaacacgttgatattctggcgttcggcgcccatagtgatgatgtcgagatcggtatgggcggcacgatcgcaaaatttacggctcaaggaaaaaccgcggtgatatgcgatttgaccgaggccgaactatcatccaacggaacggtaaggataagaaaagaagaagcggcagaggcggcacggattctcggcgtaaaagagagaatccagcttacgcttcccgaccgcgggcttttgaaaagtgaggacggcatccgccggattgtcagtgtcatcagagcctgccggccgaaaaccgttttcatgccttatccgaaagaccgccatcctgaccacggcaatgcggcggctttggtcgaagaagcggtgttctcggcggggattcataaatacagagatcaccaagaactgccggctcataaggctcagcgcgtatactattatatgatcaacgggtttcaccgtccggactttgtaatcgacataacggaaaccatcgatctgaaaaaagaaagcctgcacgcctatcaaagccagtttattcctacggcgcagtcagtgaacacaccgctgaccaacggttatatcgaaatggtggaagcgcgggaaagactgtatggcaaagaagccgggacggggtatgccgaaggcttcttttcaaaacagcttcccgttttgaatgatgatgtttttgggggcggacaatgagaccattaaaaatagggattacatgctacccgagtgtcggaggctcgggtattattgcgacggaactcggcaagctgcttgcggaaaaagggcaccaggttcatttcatcacatcaagcatcccgttcagattaaatacatatcatccgaatattcattttcatgaggtggaagtcaaccaatacgcggtatttaaatatccgccttatgaccttacgctggcgagcaaaatcgccgaggttgccgcaagggaaaatcttgacatcattcacgcgcattatgcgctgccgcatgcggtatgtgcttatctcgccaaacagatgctcaagcgcgacatcggcatcgtgacgacgcttcacggtacggacatcaccgttttaggatatgatccgtcattaaaagatttaatccgttttgccatcgaagcgtccgacagagtgacggcggtatcaaccgcgcttgccggagaaacatatgacttaatcaagccggataaaaaaattgagacaatctacaactttattgatgaacgtgtttatcttaagaaaaatacagagagtataaaagagaaacatggcattttgccggatgaaaaggtcgtcatccatgtttcgaacttcagaaaggtaaaacgtgttaaagatgtcatccgcgttttccgtaatatcgcagcaaaaacaaaggcgaagctcctgcttgtcggcgacggaccggaaaagtgcgtcgcttggcagcttgtcgaaaaatacggactgcaggatcaagtgctgctcctcggaaatcaggacagggtggaagagctgtattccatcagtgaccttaagctccttctttctgaaaaagaaagtttcggactcgtcctccttgaagcgatggcctgcggcgtgccgtgcatcggaacaaatatcggcggaatcccggaagtgattaaagatcaagtaagcggttttctggtggaagtcggcgatattcaggcggcatctgaaaaagcgcttgccgttttagaagataaacagctcagcaaacgattgactgatcatgcgctgaaaatggtggagaccgccttttcttcgcaaagaatcgtcagtcagtatgaacggatttatgacgaattggcaggaccggagtgatcttatggaacaggaatttgtcaaagccctccccatccttcatcacctgatgaaggcgggccatcaggcgtactttgtcgggggagccgtcagagacagctatatgaaacgaaaaataggtgatgtggacatcgcaaccagcgcttcgccgaatgaggtggagcgtctctttaagcggactgtcgatgtaggaaaagagcacggcaccgtcatcgtcttgtgggaagatgaaacctatgaagtcaccacttttcgtgccgaatcagaatataaggactaccggcgccctgaagctgtgcggttcattacttctttatcagaagacttaaagcggagagacttaacgattaatgcgatggcgatgtctgccgaaggagagctgcttgattatttcggaggcgcacatgatatcggacaaaagctgatccgtacggtgggtaatcctgaagaccgttttcgggaagacgctctgcggatgatgagagccgtccgctttatgagtcagctcggctttctgttagaaaaagaaacaagagaggccgtcataaaagacagggagcttttggcacatgtatcagtagaacgaaagaccgccgagtttgaaaagctgctgcagggcgcttcctcacaagaagcgattcaaacgatggtgcagacaggtttgatacaagagctgcccggcctttccggttatgagcggcaaatgctggaagcgagcggctttccgttttcttctttagatgcacgcgaagaacgctgggcagtgctgttattgtttctcggtctttgtccgaaaagcgccgaggcgtttttaaaacaatggaaactgccgggaaaagtcataaaaaaagcggtgcagatcataagcgtttatccggcgcagctggaagcggaagcgatgtaccgggcgggagaggcgctgttttcaaccgttaaaatcgggatgctgaaaaagcataagacgattgatgaacaaaagctgaaagaggttcagagcctgtatgagcagctgccgatcaaaagccttcgagacctcgacatctcaggcgctgatctgatggagctcagaaaccgccgcgcgggtaaatgggtggccgaagaacttcgccggattgaagaagcggtattggcagggaagctccctaaccgaaaacatgacataaaggagtggctcgcatcatgggatcaacattaagaacccgattaattgatttattttctgaggcgggtgacggctttatctccgggcagaaaataagtgacgcgctcggctgctcgagaaccgccgtttggaaacatatagaggagctccgcaaagagggctatgaggttgaggcggtcaggcgaaaagggtacaggctcattaaaaaaccggggaaactcagtgagtccgaaatccgtttcgggctgaaaacagaggttttgggcaaacagcttcattaccgggacgtcctgccgtccacccaaaaaaccgctcatgaacttgccaatgacggcgcgccggaagggacgctcgtagtcgccgataaacaaacggcaggcagaggaagaatggccagagtatggcattcacaggagggaaacgggatttggatgagcctcattctgagacccgacgttcctttgcaaaaaacgccgcagctcaccctgctatccgccgttgcggtcgtacaggccatcgaggcttttacaggtgtacagcccgccattaaatggccgaatgatttaatgattcacggcaaaaaagccgtcgggattttaactgagctgcaggcagaagaagaccgtgtccgttcggttattctcgggatcggcatcaacgtgaaccagcaggaaaccgattttcccggcgagcttcaggacattgcgacaagcctcagcatggaagctggcgaaaaaattgacagagcgggtctgatacaagagattctgctgacttttgaaaaacgctatcaggattacttgaaccacggctttacaccgatcaagctgctatgggaaagctatgcggtcggactggggaacgagctcagagcgagaacgctgcaagggacgttttacgggaaatcgctcggcattgatgatgagggagttcttctcttggaaacgaaagacggcataaagaagatctattctgccgatattgagctcaattaatcttagttggtacaagcctcgtgaatttggtatacttcctatgggcagtatcataatgaactgcacctgatcagcagaacagagattacgaaaagtctgccttgatccaaaaaaggactgggacagagggatgacattcgccgaacgttaaacaagtgggaatccttcttattttacagaaggcttttttgcttgcgaagaattggcggctcatctcctcaccgtttagaggaggagaaacagaatgaaaacaaaactggatttcatgaaaatgaaggaaaacggagagccgatcgtgatgctgaccgcttacgattatccgcaggcaaagcttgcggaacaggcgggagtcgacatgattttagtcggggattcgctcggaatggtcgtgctcggactcgattcaacagtcggcgtaacggtcagtgacatgattcaccatacaaaagcggtaaaacgcggtgcgaaaaatacgtttatcgtaactgacatgccgtttatgtcttaccatctttcaaaagaggacacattgaaaaacgccgcggccattattcaggaaagcggcgcggacgcgttaaagctggaaggcggagacggcgtttttgaatccatccgcgcgctgactctcggcggaattcccgtcgtcagccatttaggcctcacaccgcagtctgtcggcgtattaggcggatataaagtacagggaaaagatgagcaaagcgcgaaaaagctcattgaagacagcatcaaatgcgagcaggcgggagcgatgatgctcgtgcttgaatgcgtgcctgctgtactgaccgctaaaataaaagaagaagtatccattcccgtcatcggaatcggagccggttcaaaagcggacggccaagtccttgtctatcatgacgtcgtcggccacggcgtggacagaacaccgaagttcgtgaaacaatacgccaaaatcgacggcacgattgagtcggccctcagcgattacgtccgtgatgtgaaagaacgggttttcccggaagaaaagcattcctttcagataaaccaaactgtgctgcaaggcttgtacggaggaaagtaagcgatgaaacaactgacagaaactcaacagctgaaagaattaattgcacaataccgctcagaaggccggacgatcggattcgtcccgacaatgggttttcttcatgaaggacatctgacgctggttgaaaaagcaagcaaagaaaacgatattgttgtgatgagcatctttgtcaatccgactcaattcggaccgggcgaggattacgaagcatatccgcgagatttaaagcgcgatgcccggcttgcagaacaggcgggggcagatgttttgtttacgccgtctcaaagtgacatgtacaaaggcgagcaaaatgttgccgtgcaagtgaaaaggagaactgacgtgttgtgcggcgcctcccgcgtcggccattttgacggagtggccactgtgctgacgaagtttttcaatctcgttaaaccgacccgcgcctacttcggcctgaaagatgcccagcaggcagcggttgtggacggattaattgaggacttctttatggatatcgaattggttgcagtggacacggtcagagaagaagacggacttgccaaaagctctcgcaacgtctatctgactgagcaggaacgcaaagaagcgccgatgatctataaagcattacagcaaggcgccgaactgatcagagacggtgaaagaaatccggaaaccgttataaaaaccgtcaccgatatcatcgaaaacacaagcggcgtcattgattatgccgaactgtacgcttatccggagctgactccgcttaaaacattaaacggcaaggtcattctggcctgcgccgtccaattttctaaagccagactgattgataatatcattattgatattgatgaatgggagagatcataatatgtaccgcactatgatggccggaaaactgcaccgcgctaccgtgacggaagccaatttaaactatgtcggcagcattacgattgatgaagatcttttagatgccgtcggaatgctcgctaatgaaaaagttcagattgtgaataataataacggagcgagacttgaaacgtatattattcccggtaagcgggggagcggcgtcatctgtttaaacggagcagctgcccgtctcgtccaagaaggagataaagtcattattatttcttatcaaatgatgtctgatcaggaagcaaaaagccatcagccgaaggtggccgttctggatgatcagaataaaatcgagcagatgctgggtcaggagccggcacacacgattttgtaaaagagcccccttcatgggggttttcttttaagatttaggggcaaaagctgtttttccgctccatttctcaacaaaacgtgttacacttttctcgtatgcaagaattgaggtgtccattttaatgaacaaacaacggttcgttgtcatagatgtcgaaacaacaggaaattcgccaaaaaagggcgataaaatcattcaaatcgcagcggttgtcattgaaaatggacaaataactgagcggttttcaaaatatatcaatccgaatcaggccatcccgccgtttattgaacagctgaccggaatttcgtccggaatggttgaaaatgaactgccgtttgaagcggtcgcagaggagatttttcatctgcttgacggcgcgtattttgttgcccacaatattcatttcgacctcggatttgtccggtatgaactgagcgaagcgggctatgagctgccggattgtgaagtgcttgatacggttgagctttcgcgtattgttttcccggggtttgaaggatataagctcggtgagttgtgtgcggagctgaatattgttcatgaccgccctcaccgcgcagacagcgatgcggaggttacgggactggtctttttagacattttacataaactgaaacatttgcctttaccgacattaaagcagcttagaaggctttcacagcattttatcagcgatttgacgctgcttttggattcttttatacatgaaagcaggccggcggaagaaaagcgctgcattccatacgcctctttttcaattaaagagcccgatcacattccggtttcccgtccggtgaatgcggccattgaccttgaaaagtggaacgaagaaaaagaacagatcttatccggcatcatcccccgctatgaaaagcggaaagggcagctttcgatgatggatgaagtgcttggcgccttccgcaatcgggagcatgcgctgattgaagcggcgcccggcatcggaaaaacgatcggttatctcgttccggctgttttatttgccaaagcggagcaaactcccgtgattatcagcacgtactctactcttttgcagcagcagatcatgtctaaagatcttccgcttttggagcgtatgtttccttggccggtcaaagccgctattttaaaagggaaatcacattatctgtgcctgcctaagtttgaacatattctgcatgaggaagatgacaactatgatgcggttttgacgaaagcgcagcttctcgtctggctgacggagactgaaacgggcgacgccgctgagctgaatcttccatcaggcggcagattgctgtgggagcgcatggcttacgatgagaattcttttttgaaaaaagggaaggactcggctgccgggttttatgaacgggctaaagaaaaggcgcaggccgcagatctgattatcacaaaccatgctttgctgttttcagatcaaagcagtgaaacgaaaaaactgcctgcaagcggaacggtcatcattgatgaagcgcatcatttcgaacgcgctgccagcgagcacctggggaagagagcttcatacatcggactgcacacaaagctcagccgaatcggaaccttaaaggaacacggactgttaaagcggatgagaaaactgttttatacgtatgaactgccggcggaaagtttttttgacgccgatgagtggatgaagcatattcaatcggaaagcgacgcatttttcagttcagtgcattcttttgtcaaacgaagaaaacctaaagacgatctgaaccgtctcgtttatagtctcaatcataaaagccaggataaagggtttcacatgataacggacggagccgagcggctttgtgcgatgctggatcagctgcttgacatgttttcagtacaggagaaactgttacatcaaaagcttgatcagatgaaaagcggagcggcttttttagcggccgaatatgtaaagtgtatcagggggctgaaagaatatcgcgatacgttcagcaggctgctgtttgaaaatgatgagaaagaagccgtttgggttgaaattgacgcgaagggcgcaaaaaatgccgtcagtatctatgcgcagcctttggagcccggtgaaatgctggcagaccagtttttcgcccgcaaaaaaagcgttgtgctcacatcagcgaccttaatggtggagcattcttttcaatttatgattgaaaggctcggacttgcggatttttatccgcgcaccaaaagcatcccgtctcctttttcatacgatgatcagatgaacgtcatcattccgaaagagatgaaatccgttaaatatgacggagagcgggaagtcattgagcatattgccaagtatgcagaaatcatgtcaaagggaaaacagccgaagatccttgtcctgtttacgtctcatgatatgctgaaaaaagtgtatcaggaactgaaactcagtatggagatatcaggcattcagcttctcgcccaaggtatttcgggcgggagtcccggtaaattaatgaaaacctttaaaacggcaagccgggcgattttgctcgggacaaatcatttctgggaaggcgttgattttccgggggatgaattgtcaaccgtcatgatcgcaagacttcctttcagggcgcctgacaatccgcttcatgccgcaaaatgcgaatttgccaaaaagcaggggaaaaatccgtttcagacgatttccctgcctgaggccgtgttaacgttcagacaggggatcgggcgcctgctccgtacggcgggagacaagggaacaatcgttcttttagatcagcgtgtaaagacggcgggatacggacggctgtttcttgaagcgctcccgacttcatctcttttggagctgacggatgccgaactcggggattatgtcagccaaacggaataaaagccgcataaacgcggctttcgtggtgtgggatgaggaattgtttttatagtaaaagcgggttcatgccgccttgtgattttattatgccgcgggcgcatcccgttatgactaacaaaatttgttcgaccgatggagggtataaaaatggaaagcaaaattgaaattctgtcaacgattaatgtggagcattcagatgatttatataaaatcgtcgatacattaaaccggactttgaaacgggacaatctgatgttcgggcttgcgctcgacgaagaaaatcaaaatgaagcggtcttcaccatttatcgcacataggtgaaaaagatgagaaaaaaagcattaatatttacagccgtatttggtattatttttttagcagttcttttattttcggccagcatttttaaatctgcaatggcccaaaaagaagaaggccacgaaacagctgccgcagccgctaaagaaaaaacggatctgacagatgctgagaaagtggagacctttgtcggcaaacagaaatattatgttgttaccggaacggataaacatggaaaagatatgtatgtatgggttccggccgacaaaaaagcaaaaattctctcaaaaaaagccagtgacggcatttcaagcggcaaggctgccaagatcgttcgggacgaagggcttgtttccaagctgaatggcgttcacctggcgagagaaaacaatgttccgttatgggaagtgacctatatcaacaaaagcgggcagtatagctttagttatgtggattttacaagcggcaagattctcaaaaacatcacaccgtgagacgtattagggggagttcaaattgaaattggcaaaaagagtatccgcattaacaccgtctgcaacacttgcaattactgcaaaagcgaaagagctgaaagcagaaggccatgatgtcatcggcctcggagcaggagaaccggattttaatacgcctcagcacattatagatgccgcggtgcgttccatgaatgaaggccatacgaaatatacgccttcaggcggtctgccggcgctgaaagacagtatcgcaaaaaaattcaaaaacgaccaggggattgaatataagccgtcagaaatcattgtctgcaccggagcgaaacacgctctgtatacattatttcaggttattctcgatgaaggggacgaagtgattataccgactccttactgggtcagctaccctgagcaggtgaaactggcaggggggcgtcccgtctatgcagaagggctggaatccaatcagtttaaaatttcaccggagcagctgaagcaggctatcaccgagaaaacaaaagcgctcattatcaattcaccgagcaacccgacaggtgttatgtatacgaaagaagagcttgcggaactcggaaaagtgtgtctggagcatggcattctgatcgtttccgacgagatttatgagaagcttacatacggaggaaaaaaacacgtctcaatcgcacagctttcagatgaattgaaagagcagacgatcatcattaacggcgtgtcgaaatctcacagcatgacgggctggaggatcggctatgcggcgggttcggagacgattattaaagcgatgacgagccttgcgagccacagcacatcaaatccgacgtctatcgctcaatacggcgctattgcggcctataacggtccggctgagccgctggaagagatgagacaggcatttgagcacagactgaacaccatttacgctcagctcagtgagattcccggattcacctgtgtcaaacctgaaggggcgttttacttgttccctaacgccaaagcggccgcagaaaactgcggattcaaagatgtcgatgaatacgtcaaggcgcttctggaagaagaaaaagtcgccgtcgtgccgggctcgggcttcggctcaccggacaacgtccgtttatcttacgcaacgtcactcgatcttttagaagaagcggtcgaaagaatccgccgcttcacggaaaaacacagctgattctgaaaaagcggcttttaaagccgcttttcacttgcattgaccccgttagagtagaacgggtataataaagtgatgaaaaaagagattcaggcagattcctgaatgtctttcttgttctggagggaaagagtttgaaaacaacaatcaaccaagtgtataaacacacaggcgaggaagtaacgattggagcttgggtcgctaataaacgctcaagcggtaaaatcgcatttttacagctgagagacggtacaggcttcattcagggagttgtcgttaaagctgaagtagaagaagacatcttccaaatcgcgaaatcagtgacacaggaaacgtcactttatgtaaaaggaattgtgaaagaggacgagcgttcaccgcttggctatgagcttgctgttacatccattgaagtcattcacgaagcgactgattatccgattacgcctaaagagcacggtacggaattcttaatggatcacagacatttatggctccgttcgaaacgccagcacgcaattatgaaaatccgcaacgaaatcatccgtgcgacttatgaatttttcaataaagaaggcttcgtgaaagttgatccgccgattttgacgggaagcgctccggaaggcacgactgagctcttcgcgacaaaatattttgatgaagacgccttcctgtctcaaagcggccagctgtatatggaagcagctgcaatggcgctcggaaaagtattctctttcggaccgacgttcagagcggaaaaatcgaaaacgaaacgccatctcatcgaattctggatgattgagcctgaaatggcatttgttgaatttgaagaaaaccttgaagttcaggagaattatgttgcatacatcgtacaaagtgtgctggaacattgtaagatcgagctgaacacattaggtagagacacatcgaagcttgaacaaatcaaagcgccattcccgcgcattacgtacgataaagcgatcgaattcctgaaagaaaaaggctttgacgatattgagtggggagatgacttcggtgcgccgcatgaaacagcgatcgcagaaagctatgacaaaccggtgtttatcactcattacccgacgtcattaaaaccgttttatatgcagcctgccaaagatcgtgacgatgtcgtgttatgtgccgacttaatcgctccggaaggctacggggaaatcatcggcggttcagaacgcgttcatgatatggatttattggaagaaagattaaaagaacacggtctggattcagatgcttacaaatggtatgctgaactcagacaatacggttctgttccgcactccggcttcggcctcggacttgagcggacagtggcttggatcagcggagcgcctcacgtgcgtgaaacgattccgttcccgagacttctgaaccgtctgtatccgtaatagttatgaaaaacgaagtctcctgcaagggagactttttctaagtaaaggggaaaactcccggagataaccttttacagtaagaggtgtaaggatgaaaaaacagcaatttatagatatgcaggaacttggcatttcaagcattcccaacctgctgttgacacattaccggcagctcgggctgaatgaaaccgaattgatcctgcttttgaagattaaaatgcatttggaaaagggctcttattttccgacgccgtttgaacttcagtcaggcatggccatctctgctgaagaatgtacaagctgcctgagaatgtttattcaaaaaggttttctgtttattgaagaatgtgaagaccataacggcataaagtttgaaaaatattctctgcagccgttatgggcgaagctgtatgattacatgcagcattcacaaaacgaaacgcaggaaagaacgtcagaaagagaacaaaaaagcctgtataccatctttgaagaagagttcggaagaccgctgtcgccgcttgaatgcgagacgctggccatatggcaggaccaggatcagcatgatgcgattctgattaagcacgccttaaaagaagccgttttatcggggaaactcagttttcgctatattgaccggattttatttgaatggaaaaagaacggcttcaaaacggttgagcaggcgaaggcgcacagtcaaaaattccggcgtgttcaaacgaaacaaaatgatccgcaaaaagagtatacgaggcaggtgcctttttataattggctggaacaataacatgagaaggggagaaacgtgttaaatttaaagcagattgaatattgtcttgaaaaaatcggcgatatgtttccgcacgcagaatgtgaacttgtccattcaaatcctttcgaactggttgtggcagtcgcactatccgcgcaatgtacggatgctctcgtcaacagagtgacaaaaacgctatttcaaaaatataaacggcccgaagattatctttccgtatcgctggaagaactccagcaggatattaaatcaatcggtctgtaccgtaataaagccaaaaatattcaaaagctgagcaaaatgatcatcgaagagtacggcggagaagtgccgaaagaccgggatgagcttgtgaatctgccgggtgtcggacggaaaacggcaaatgtggtcgtgtctgttgctttcggcgtacctgcgatcgcagtagacactcatgtggagcgagtctctaaacggcttggtatctgccgctggaaggactctgttttggaggtagagaaaacattaatgaaaaaagtgccgaaagaggattggtctgttacgcatcacagattaatatttttcggcaggtatcattgtaaagcgcaatctccccgctgtgcggaatgtcctttgcttccgctatgcagagaagggcagaagcgtgacaaaaaagggctggtgaaacggtgacggcgattgacattctggcaggctatgaaacatacctgcgcagccttacggacttggaaagccttgagatcaaaacggcgctgcgccgccatccgctgtatatggatttcagcggtcagccaaccgtgcagccatggagggaaaggggcgaatatgtcccgtttctgtttcaagtttggaatgaaacgaaagaaacgctgcttcccgtttttcaaacaagaaaatcgagatgtgatcaaaatgacatgctgaagggaattgcctgtctgattgccgcttttcactggacggcaggggagcgggtcacatcactcgattggtctgtgcttgaaacaaagcattttcccgccgaaccgatcaattgggcggagcgaatggcgtttattttaacaaaaccgactcaatttcactcctttattcagctggatgaattgatgacggagatgaagaaacaatatcataaatatgaagtcatgaacaaaagttaaaaacctccttttcttataaggaggtttttttgtatgaaaaaaatccttcacctgtttgaggtgaaggatttcgtccgccgctaatgagcggaatttgactggatggttgacgaattggactgcccgttgatatttgaagatgagtcttggtttttgtccgtttgaccgctgtcaggtttatttgagccgtctgaaccggaatcggaatcattatcagggccgttatcttgctgtccgttgttatcggtcccgttaccgggctgattctgattgttgttatctgtttgatccttatcggattgatcctgatttttatccgggtcatcagttggtgtttgatccgatccgtcagacgtatctgtttgattgtcatctgtgtttgaatcatcggtttgcgtcttgtccttatctttatcttcatcagatttctgttcatcgtcagtcgctttatctttatctgcatcgtcttcttcatctttcgggactttgaaagatgctgatgccgtatcgctttttccgtcatcgttttccgctgtcacctggaagctgtatgtggagcctggtgtgacatctgagacgacggcttcttttgccgaactgttttgaatgtcactgtagcttccgccgtcaacggattgtttgacattgaatgttgcatcaccgtcataatcccagcttaaggttaatgattttttatctttgtcgtatttcacttgcaatcctgtcggtttatcggctttttctttcgtgtacgttttagaaacggcagttggctgcgttcctttcacgaagtactccgtcacttttttatcatccggcgtattcggtccggctaaagcggcaggattcgagcctttctcaactgtttctttgacgacactgtcaggctgcttgaagcttcctttaccgtcatcaacgtatgagatcagcttttggaaaatccgttttgcgacttgctggtcagcagaagacagtgatttcttgcctgctttgttgccagactcaactccggtccaaaccgccgctgtatattgaggggtgtatccgacaaaccatgagtctgggactccgcccggagcaatgttatatttttgaatgtcctctttagtaaagttggtcgtacccgttttaccggcgacttccacgttcggcacctgagccagtttacctgttcctgattcgacagctgatttgagcatatcggtaatcataaacgctgtgtagtcgctcatagcacttttcggtttcggtgttaaatcaagcttagtgccgtcattaaattcaatcgatgtgaccgcgtgcggttcgttgtacgttccgttatttccgaacgcactgtaggcgcctgccatggtcatagtagatacaccgcggttaccctcaccaaatcccccgatagagtagggttcatatacttgatctttgtttaatcccaatcctaagtcgtttgcgaagtcgacggcattatcttttcctgctgcttggtatgcttttaaagcaggaatattacgtgagtctgcgagggcctctcgcatagatatctgacctctgtatttattgtcccaatcatgaatcggtgtgccgtcagagtacgtataagccgaatcatcaatctgctcatacgtcgaccattttttattttcaatgaccggcccgtaatcaagaattggttttatcgttgaaccgggctgggttttaccttgtgttgcataattgaatcccccggtagttctgttccgtcccggtccgatggcgcggatttctccgtttgtcgtatcaaggagcgtgacgccgccctgcatgccttcggtaaagccggctgtgtcgccgttcatcaattgatcaagataatcttgtgctttcgtatcaagagtcgtgtaaatttttaatccgtcagttgaaatattgacgtctttcttttcttttgtctcaatttctttcataacttcttcgacaaaagcgctgtatttatttgtgtcctttttatcgtattccttttggctgacgacgccttcatctttcatggacactttctttgctttttggtagtcagaatttgaaatgaatccttgtttttccattaagctgagaacaatgtttcggcgtttttcggaagccttcggatttttaaccgggttatatccggtcgggctttgcggcattccggcaagcgtcgccgcctgttcaaccgtaagcttgctcaagtcttttacgccgaagaattcttcagccgctttaccgacgccgtaggcacgcggtgagaaataaattctgtttaaatacatttctaagatttcatctttagaataatggcgctccagctgcagtgaaagccacacttcctgtgctttccgtttaatcgttttctgatgggtcaaaagcgagtttttcacaacctgctgggtgattgtgcttcctccctctgaaccgaatccatccgtaaagttggcgaccaaggcgcctccgatccggatcgggtctataccgtggtgcttataaaaacgggcgtcttcagttgcgataaatgcttctttcacaacatcgggtatatccttaatcgggacgtaggttcgtttttcaccgcccacttccgctatttctttgccgtttttatcgtaaatcgttgaagagtaaggcgttttcagcttggcttcgtccaaagacggcgcgccggaaaccaaaacggcaaatgccgccgctccgccgactatgccaaggacaaacagaataaccaaggacagtacaatctttttgaataaaccgcctttacgctgtttcttgccttttttcggtgaagagggcttagtgcttttcgtctgccttgccttacggcgttcttcacggctcgtaaattgatctgacataacatctcaacctttcgtttatcaacctttcgctcagtctactgttcctgcgaaaaataaagctgttcaataatactaatataatcaattctcggtgagtatccaagggaaatcggaaaggaagcatcttctaattcgtctttgcgaattgattttctgccattgttctcctttctctcccaaaagacaaacagcttgtcggcttcgaggaaataaacctttccgaaagcggatataataacaaaacaaatgccgtcttgtctgaccacctgcttcatatgctcaatctgatgatcatgaaaattctgcaggggaaatgccgttttgttttttgtttcttttgcctcaaaatcaatgtagcgccctttataaatgccgttgtagtcagttgtggaagactgtttaaaataagcttccttaatgactgcggcgcttcttttcggatagtggacgtttacaatctggacgggtgtcggctttttgtgaatgacagcaatttggttagccagataatacttattcgtttcattcaggtcgtcttcgagggtcatgccgcgattactgtatgaatgagaccgtttctggctgttttgggatgaaaccgttttgttcggctgaaaagtttttccattcgggtaccgaatcactttttccatcctccttatcaaactaatagtgacggaagtgaatgaacgtgcataaacgacagaccgtaaccgccattcttcgcctgattgaaaaagagacgaaaataaaaaatgccgataatatttcccggacgaatgcctataaagcatattatgaccgccatcctgagatcaagtggccgcttttggcatcctttgtgtcccgcaatgcgggctggtcgatgactgatttaagaggcgtcctttatcaggagggccttgacagcagtcagaaaaactggtttttcctttcgtatgaaagggcgaattggctgattttttctgatgcctatcctcagcttctgatctaccagtggtcaaaacaaatcggcgaacctcttttccgtcatcttcctcatttccgcgtctcggcttttatgcaggaagagtggcttcgcttttggcgtgacggagatacggaacggctcatgtatgctcttattataaatgaacaaaacactatccaagcacctattatacaaaatccttcgtttaaaaagaatgtttttggcacgattcctttttatttaagtgattggtttcactttaatacggtgatattcccttcatttgacggacaattatacggaatttccgtcaaacggttttcaaaaaccgaagagagaattacgctcggaaaacagctggcccgccttctgttcagccctgatcttcacgcttctttttaccgttttcttgataccgttcctcataccggatcacgctttgatatggagaaaatgatcggcatcaaaaaaagaacatcaccgatgctgaggacaacctatcccattgttgcccacccattagacggcgaaagggcggattggtttcaaaaaaggttaagaaaaggggctttcttacaggagaaaatgccgaaacagcttgaactgacggactggtacttccagaaaagacgggagctccatgcgctcttcgcggttaaagagtggctgaagaaatgaaaaagcccgaaaccgttcgctggggtttcgggctgctgatgtgttacgtggaagggcggtttgggccgcctaattttttatcaagcgtatcagtcgtttttgcttcggttttttgctgtttacctgcatttttcggtctcgttttcatacggcacctcctcaactgtatcgtttgcattaacgtgccggttcatacaaagtttgcggcacttttttgtcgaaaggcacgccttttaggataatctctgtttgtttgccgaactgcttctagttttgtcatgtgcaaaggagagcggtatgaaaacgagaattatattctaaagaaacgcaagtgataaaagggaggaacatgaatgtctgtttacacgagcaaggctgatattctccgtctgctttctgatatcgaattccggatttctgctgctgaaaagacgcttacccaagcagtcagatcctgtcaggcggaagctgaagaaatcagacaggagaaactttcccgccttgaggaagaggcgcgggagcttcatgtttgtattgatgacctgtttttggctgaccggcgtaaaaaggatttgccgagagcctgccggatcagctgattttatgcaaaaactttggtaccatatgtactgaggtgagtccgtttgcagacacagtcgttattggagctgacagaacaaatgatagaggcggttctggaagccgaaaaaaggtatcaggatggaaaagagtcaggccgttcatatgatttttttgagattattaaacccgatgttgaaaaaagagaccggctttgcgcgctttggacagaagcagcgcttgcgtttattcaggaaaaccgtccgaaatacgttcatcacgcacaaattcaggccgttacagaaaatttcggagagctgatgctccaatcatatgttcatcatattcataaaaaaagatacagggatttaactgaatctgttttatatacgcttcgtatattaagggatgaaattgaaaaagaaggcagctgaaaacggctgccttcttttatataaaggggtcgggtatgttattcatacgccgggttttctgctccacttgcttcgagaaccttcatactgtttcgaaattcggttgcggtgagatggccttgaatatagaggaattttgcaaagtccatcagtttatctgcacaatctgtttcatattttttcacttcagcaaaacgctttcttaagtatgatacgttcataatggtgcatcccctctcatgtatgttgagattatggtaacataacgattcgacttttttctgtttttaaaaaattaagactttcgacagcatttgacaaaaatcagaatcaccgaaagcacataaccacggcggaattcatacatatatagcagaaacttagtgagagacaagggggaatgtcatatgcaatggagagcgcagccatatcaaaatatgtaccagcagccggcgggatatttctacccgcagcagatacagccattacagcagccgtatccgcagcagatacagccattgcagcagccgccctatcatcagcaagggcagtacccgcagcaattttatccgaatcaggaatacggtcatatgcagcagccgtttgctccctctcctcctcaggcagccatgcccggggggcagccggggtttgtgaatccttaccccgttcccagaccgaatcagcagcagtcttcccaattctcaggcatactctcccagtttaaaaaaacgaacggacagtttgactttaataaaatgatagatacaacggggcagatggtaagcgccgtaaatcaggtcggatcgctggtgaaaggcttcaccagtatcttcaaataaaaagcatgaatgatatccatcattcatgcttattttttagggaaaaagagggtaagcgtctgttcattccaggatgtttccatatcttcttcactcaccttatacgggaggacaacggttcttgtcatgcttgaagacacatgggatgaatgagcctgtttatgatcgtagcggattgtaacgtgaaggtagcaccccttcgtttccaccagcatatcaccgtcacggaatgtctcgggaacgctgatatcaaccgcgaggcccgtcggctcttctctgacgtcaatcgtcacttgcgcttcagtaaaagccgaattgacaaggtgctgaaaaccctgcatcaattctgcgaagggacctgagtgaaaaaattggtccatcgcatggctgatgatgtcctcatttctttgcggatcaagtttatcgttttgtgattgatccatatgaccaccgcctttttacaaacagactatgcgatgttatgccgtatggttaagaattgaaggaaaaaagaaagtatggttaaatagtggagaataaactggtaacggattcacatttaggaaggggagcacaacacattgctgaaaaaattattcggattgggagacagccggaaaaagccggccgaggaagtgattttttctccggctgacggagcggtgatggatttggcttcagtgccggatcccgtattttcacaaaaaatgatgggggacgggattgccgtcgagcctgcaaacggagacattgtttcaccggttgagggagaagtgattcagctgttccatacaaaacatgctgtcggcatccgcaccctttccggagcggaacttttgatacatgtcggtttggataccgtcaatatgaacggcgaaggctttgaagcgcatgtaaaagaaggagacaaagtgaaaacaggcgatctgcttttaacgtgccggctggatttaataaaagaaaaagcaagcagcaccgtcatccctatggtgattatgaatggcgatgccgcagaacctttgcaatttgcaggcgcaaatgaagcgaaaaaaggacaaacagagctttttacgataaaaatgaagtaggcaggggctgattccctgctttttttcttgtgcaggattttcatctagccaggcaaacaaatattcggtaaactgtacctcataaagaggtgtgaacgatgaagaaaaaatcactgagcgaactgattcaggaattaaaaaatcatgaaaatattgtgcattggcatgaagaggaaccgcgggaggcgaaaaccatgccgatgccggagcaagtagatcggaaaattcgggcggctctcgaaaagagggggatcgagcggctctttacacatcaatactccgcttttcagacggttcaaaacggagaaagcattgtggctgtcacaccgacggcctccggaaaaacactgtgctataatcttccggttcttcagtctatcgcggaagatgcctcaagccgcgcgctttatttatttccgacaaaggcgctcgcgcaggatcaaaaaagcgagctgaacgaaatcatagacgagacgggcatggacattaaaagcttcacctatgacggagatacgtccccggccatcaggcagaaagtcagaaaggccgggcatattgtgatcacaaaccctgatatgcttcattcagccattcttccccaccatacaaaatgggtgagtctgtttgaaaacctgaaatatatcgtcattgatgaattacatacgtaccgcggcgtattcggcagccatgtggcgaacgtcatccgccgtttaatgagaatctgcgctttttacggaagcacgccgtcatttatctgtacatccgccacaatcgcaaatccgagggaattggcggagcagctgacgggaaaatcagtgcgcctgattgacgataacggcgccccggccggaagaaagcactttgctttttacaatcctccgattgtaaataaaccgctgcatattcgaaaaagtgccaccgtggaagtgaacgaacttgccaaaacttttttaaaaaataagatccagacgattgtttttgccagaagccgtgtccgggttgaaattattttaagccacattcaggagatcgtaaaaaaagaaatcgggtcgaagtctgtcagaggttatcgcggcggatatcttccgaaagaaagaagagaaatagagcgggggttaagagacggaagcattctcggcgttgtcagcacaaacgcgctggagctcggcgttgatatcggccagcttcaggtctgcgtgatgacggggtacccgggcagtgtcgcgagcgcatggcagcaggcgggccgagccgggcggcggcagggagaggcgcttatcgtgatggtggcgaactctgatccgattgaccaatatattgtccgccatcctgattatttctttaaacgctcgcctgaatctgcaaggattaatcctgataatctcattatattggttgatcacctgaaatgcgccgcgtatgagctgcctttcagagccgatgaaacattcggagaaaatgatgcaagagacattctcgagtatttagaagaagaaggggtgcttcacgaaaaccgcgaacgctatcactgggcgagcgaatcttttcccgcctccaacatcagtctccgttcggcgtcacaggaaaacgtggtcatcgttgaccggtcagagacggctggtgtaaaaatcatcggagaaatggaccgcttcagcgcgatgacgcttcttcatgatgaagcgatttatcttcatgaaggggtgcagtaccaggttgaaaagcttgattgggaccataaaaaagcgtacgtgcgaaaggtcgatgtcgaatattatacagatgccaatttagcggtgcagctgaaagtgctggacattgacagaacggacagcagaaagaaaacggccttacatttcggcgatgtaaccgtgaacgcacttccgacaatatttaaaaaaattaaaatgacgacatttgaaaatataggatcagggccgattcatcttccagaagaagaactgcataccagtgctgcctggcttgaattgaaagagacggattcggagatcggcgaaaaaacgcttgaacagctgcttttaggcattgcccacgtcctgcagcatatcgtgcctgtatacgtcatgtgcgaccgaaatgacgtgcatgtcgtgccgcaaatcaaagccgcacataccggacttccgacaatctttctgtatgatcattatccgggcggaatcggacttgctgatgaagtatataagcgatttgatgaaatcaatgaaggggctgagcgcctgatcagacaatgtccatgtcaagacggatgtccttcctgcatcggctccgaaatagaaggaatagatgcaaagaaagcgatactccggctcttgaattacgtgtaaaagaaaagggggacgaaagatgtccttgaaaaataaattaaagcggatgaaaaaccacctgaatgtgccggaagctgaaaaaaagccggcagcttcacaactttcggtcccggatattcaagtcccatttagagaagaatgggaggcattcggagtgaagcctttcttttttgaggatgaatactgtcttatccgcgaaaccgtctatccgctttcgcaccgccacggacggtacagcttcagtgaacttgatgacgtcatggcattatggaataaaggcggtttgacacatactttatcagcagaaggatacgaaaaaagccagctgttcttctttgatactgaaacgaccggcctcggcggcggggccggcaatatgatctttttgctcggccatgcaagagtgtatgaagaccgtgtcgcggttaaacagcatctgcttcctaaaccgggaaacgagacggctctttacaaaagctttttaagtgaggttgacattacgtctcttgttacgtataacggaaaagcctttgactggcctcaggtgaaaactaggcatacattgctgcgggacaggcttccgaagcttcctgacttcggtcactttgatcttctgcacggggcgagacggctttggaaacataaattagagcgtgtatcgctttcggcggttgaaaatgaagagcttgcttttaaaagggacgaagacacacctggttatttggcgccgatgctgtattttcaatttttaaaggcggaggatccggctcttttaacgggagtgctctcgcataatgaacaagatgtgctttccctcatcgctctttacatccatatgtcaaaaaagatttttgcatcttctgatcagacgtcagaacgtcaggaagcatacgccatggcgaaatggtttatcgctcataaagaaaccgatcgggctgtttcacagctggaagcgctgcaaggcaaagactttgaagattcggatcgggccctttttgacttagcaatgctttataaaaaacaaaaccgcaggcaagacgccgtgcccctttgggagaaactgacgggctctgatcttcacatatgcagacaccaatcagcggtagagctggcgatctattttgaacatcacgcaaaaaattataaaaaagctctgcaggccgcgcagcaggcggcagaagacggggaaatatcggaaaaagaagccgagaagctccatgtgagaattgcccggcttaagaggaaatattcttcttgaaatattgcccgggaaagcgcaaaagccgagctgtttcgccaaaaatatttttttctgaatccgcatcgattttgttgtagaatggtgccgcatcttgtaaaatagcgttagttatttataggggagagttggtatgtataaaggtgttttttacttgttctttgtcgtggtttttttgattgcgtttgtattttcgaattttaaagacagcttgctgacacacttttaaattgggtgattgaattagaacatgcaccctcttttcttcataacctaacagtgtaatataagttaatggagaggggatttagcatgtttcatcatcattgttgcagaccaaacgtgatgccgccgattgtccatccgactcattgctgtgaacaccattgtttttctaacacagttgtgccgcatattcatccgcaacatacaactaacgtaaatcaccacaactttgagcacgttcattactatccgcacactttttcaaatgttgacccgacaactcaccagcattttcagtgcggaagcccttgctgcgatcattagtattgaacgcttaagcaagatcggttaggatatcagcaaatcaaaatggggcccgatggggagccccattttttaagcaggtgatcaattgaaagtattagccgtaacaggatacaagccgtttgaactcggaatttttaaacaggatgaccgggcgcttgtttatataaaaaaggcgatagaaaccagactcagaagctttattgacgaaggcttggaatggattctcatatccggacagctggggactgagctttgggcggctgaaacggcgtacgatctcagagaagagtatccggaattaaaggttgccgttatcacgcctttctacggccaggaagaaaagtggaaggaaccgaataaagaaatgtatgaagcggtgcttgctcaggcagattatgaggagagcctgacgcatcggccgtacgaaagtccgctccaattccggcagaaaaacgcgttctttattgaaaagtcagatgcgcttttgcttttatatgatcctgaaatggaaggatcgccgaaatatatgctgcagcaggcagaaaaacgccgtgaaacagacggatatccgatttattcgatcacgatggatgatctccgtgccgccgttgaagaagaagatttctttacataacacgtcagagaatatttgacaacgggacgtgtttctgaataaaatataacatgatgattcacgatatgaggtgaaaaagatgcttgctgataaagtaaagctttctgcgaaagacattttggaaaaagaatttaaaacaggcgttagaggttacagacaagaagacgttgacaaatttttagatatgattattaaggattatgaaacctttcatcaagaaattgaagaactgcagcaagaaaatctgcagctgaaaaaacagcttgaagaagcaagcaaaaaacagccggtgcagtccaatacgaccaactttgacattctgaaaaggctgtccaaccttgagaaacatgtattcggcagcaaactttatgacgaatagggcagatgcacttgtcaaatgagacaagttgctttataatgaacaagtgttcttaacgttcgggtaatcgctgcagatctttgaatctgtagaggaaagtccatgctcgcacggtgctgagatgcccgtagtgttcgtgcctagcgaagaaataagctagggcagccttgataggctgacggcaggaaaaaagcctacgtctccggatatggctgagtatccttgaaagtgccacagtgacgaagtctcatcagaaatggtgagagtggaacgcggtaaacccctcgagcgagaaacccaaattttggtaggggaaccttcttgaaggaattgaacagatagaaggacagaatgctttctgtagatagatgattgccgcctgagtacgaggtgatgagccgattgcagtacgacggaacaaaacatggcttacagaacgttaaacattattgatatgacaaattagagctctcctttaaaggggagcttttatcttgaatgaaacgaaagcttaaaagagacagggtgatacgatgaagaagtacacactaatagcgacggcgccgatgggaattgaagcgatcgtcgccaaagaagtgcgtgatttaggttatgaatgcaaagtagacaacggaaaagtcatttttgaaggagatgcgcttgcgatctgccgcgctaacttatggctgcggacggctgaccgcatcaaagtacaggtcgccgagtttcaggcgaaaacgtttgatgagctgtttgaaaaaacaaaagcgattgactggcgcgcgtacattccggaaaacgcaaagttccccgttatcggaaaatccgtgaaatcagtgcttgccagtgtgcctgactgccagcggatcgtcaaaaaggcgatagcggaaaagctgaaacttcaatcaggaaaacaaaatgaatggattgaagaaacgggccccgagtataaggtggagatttcccttttaaaagataaagccgtgcttacactggattcatcaggaacaggccttcacaaacggggatacagggttgatcagggaggagctccgattaaagagacgctcgctgccgcgttaattcagttaaccaactggacgcctgaccgtccgttcgtcgatccgttctgcggttccggcacgatcgccattgaagccgctttaatcgggcaaaacattgctcccggttttaaccgtgattttgtttcagaagactgggaatggatcggaaaagaactgtgggacaaggcgcgtcttgaagtggaagaaaaggcgaactatgatcagccgctgcagatctttgccagtgacgtggatcaccggatggtaaacatcgccaaagaaaacgcagaagaagcgggacttggtgacctgatcgaatgcaaacaaatgcgggtgcaggattttacgacgaaactcgaatacggcgtaatcgtcggaaaccctccgtacggcgaacggctcggcgaaaaaagggaagtcgagaagatgtataaagaaatgggccgggcatttgaatctcttgatacatggtctgtctacatgttaacgtcaaatgaacaatttgaagaggcctacggaagaaaagcaaccaaaaaacggaagctctttaacggttttatcaaaactgattattatcagtactgggctaaagtgcggccgcagcggaaaaagccgcaacaaagagaagacgcctgaaacagcgtcttctccggcatctttacgttttattctgccattaccagcggtgcgcttttgcgttgctccgtaaaataatgttggtctgggacatttcggtgtggccgttcacttgcgatttagagcgtttcggccgcgtccaattgtgatgaaacaattcagaatgctgatctaatcgatctttataactcatgtaaccatcactcccggatagaataattttgtgaagatggatattcgatcgaatatctgttgtagtttgtgcaggtcaggtgcggatcattcagaatggcatgtatagaaagtgaagcatcggcatagaatgatgattatttctatttgagaggtgatctattttatgctgaacagcgagcacttcagtaaaatacaaaaggcgttagacgcaactgctttccggctggaggaagccggagcggagttcggtccttccgccatgacacacgcacaggaagaacttgaaaatgcggtaaaacatacacattcaacagaccatccgttcctatgtacacatatcattaaccggaaatgataatggcaaaaacttggcgaggccaagtttttttgttgtattgaaaagggttaaatgatattatagatggtctgaatgccgaatagttaggggttggagttgggtgacaacatcacgtttgccttttgctttaacaaaagaaaagaatttttacgaagaattgaacaattggattggtgacgtgttttacgatatccttcccgagaaaggctttgaccttcgggatgagcaggtatttatggcgtttcagcttgaacgggcatttaaagagaaaaaagtcatgttcgctgaggcaggagtcggtacggggaaaacgctggtgtatctgctgtttgccatcagctatgccagatatacgggtaaaccggccattatcgcatgcgccgatgaaacgttaattgaacagcttgtcaaaaaagaaggcgacatttccaagctgacagaacatttggatctgcagattgatacaaggctgtccaaatcccatgagcagtatctgtgtctgaaaaagcttgagaaaacgatgcagcgttctgatgatgaaaagtggctggatctttatgagtcgttgccttcattcgtacacgaatcacaagcgatgcagcgcttttatccgtacggcgaccgcaaacagtacgctgatttgacgaatgaagagtgggcaggcgtcagctatgattccttccaagattgtttaacttgtgatatgagacatagatgcggtttaacactttcaagagatcattacagaaaatcaacggatctgattgtttgctcccatgacttctacatggagcatgtatggacggaagaatcacgcaaaagggaaggacagctgccgcttttgccggatcacagcgccgtcgtgtttgatgaaggacatctgctggaattcgccgcgcaaaaagcgttaacgtatcgcgtgaagcagtcgacgcttgagctgtttttagagcgtctgcttcaaaatgatatcagagaggaattcgccgaactgattgaagatgcccttgccgcaaacgatgagtttttctatgtgctgtcagaggaatcgaaggaaatcgaaggctctcaccgattggacatccaaaacgatcagcgtgttaagcgtgcggctgacgaactgtgccgtctgctcgataaaatcggcgaggcgctcgtatttgaatcggaaatgtatacgattgataagtacgagctgtcagttgtagaagaatacgtcgaacaaatggcatattcgctgtcgctgtatcaaaaggatgccatcagctggcttgaaacgcgggatacagactcaacgtttgtcgttatgccgagaactgtagccgaagttttgggagaaaaggtcttttctaaaaagattccttatatcttctcatcggccactctttctgagggcggttcatttgattatatcgctgacagcctcggaatccgtgatccgttatcattcaccgttgaatctccgtacgattacgaggagcaaatgtctgttgcgcttcacggtgacatgacgtctgagcagaaaacagccgaaacgattgaaaccattaagaagaatgaaggacgcaccctcgttcttttcccttcctttgaagacatgaaggaatttaaagaacaggctgccgcgtgggagctgccgtatccgatatactacgaaggtgacgaagagatctccagtctggtcgaaaaattccagcgggatgaagaatccgtgctttgttccgtccacttatgggaaggtcttgacattcccggtgactcgctccggaatgtgaccatttgggcgttgccgtatccgcctcatgatcccgtgtttaccgcaaagcggaacggagcgaaaaaagatccgtttgaggaagttgatctgccgtacatgctcttgagagtccggcagggaatcggccgcctcatccgttctaatcaggacagcggaaccatatccatttatgcgggcggagaaagtgaacgggtcttggccgaagtcaaaaagatcttgcctgttacaccgaaaatcgtataaaaacaaaagctgcaggattcttatcctgcggcttttttaaatccgggaagttgactttatcacggcattccattagcctgtaattgatagtgaaaagggaggggaacggatatggatttacatacatatgaaaaagagttttttgatctgttaaaaagagtatcccactatgtcgaagccattgcacttatgcattgggacttaagaacgggagccccaaaaaaaggctctgatgaccgggcggaaagcatcggacagctgtcggctgacgtttttcaaatccagacatccgaccggatgaaagagctgatcgacatccttctcgcgcatgcagaggagctctctgaagatacagtgaaagcggcggaacttgcgaaaaaagattatgatcataataaaaaaattcctgaagatgagtataaagaatatgtcattttaacatcgaaagctgaaacggcttgggaggatgcaaaggctgcctctgatttttctatgtttgctccgtaccttgagaagctgattgattttaataagcggtttatttcgtattggggctatgaagatcatccatacaacgcattgctcgatattttcgaaccgggtgttacggtaaaggtgctggatcagctgttttctgaattgaaggaagcgattattccgcttatcaaaaaagtgacggaatccggcaataaaccggacacttcctttataacgaaaacgttttcgaaagaacaacaaagagccctctccttgtatttcttaaaagagttcgggtatgattttgacggcggccgcctggacgagacggtgcatccgtttgcgacgacaatcaaccggggcgatgtgcgggtgacgaccagatatgacgaaaacgatttccgcacggcgattttcggaacgattcatgaatgcgggcatgcgatctacgagcagaatattgacgaagcgttgagcggaacgaacttatctgacggtgcatccatgggaattcatgaatcccaatcgttattttatgaaaactttatcgccagaaatcaacatttctggaccgcctattatgaaaaaatggttgaggcttcgcctgatcaatttcaagatgtgaaaagagaagattttgtacgcgctgtcaacgaggcgaaaccgacctttatccgaattgaagccgatgagctgacgtatccgcttcatattattatccgttatgaaattgaaaaagcgattttcagcaatgaagtgacagtggaagaactgcctgcattgtggaatcaaaaatatcatgattatttaggcattacgccgccatctgacgccaaaggcattttgcaggacgtacattgggcgggcggcgatttcggctatttcccttcctatgcgctcggatatatgtatgcggcacagctgaagcataccatgcttgacgatctgcctgaatttgaccaattaatagaacggggcgattttgagccgatcaaacaatggctgacagaaaaggttcatcagcacggaagacgcaaaatgccgcttgacatcataaaagatgcaacgggagaagagctgaacgttcaatatctcattgagtatctcgtcggcaaatattcaaatttatatttataaacgaaacgcccggtatacaccgggtgtttttctaaaaattctaaaaacacgaataatcgaaaaccaattctttgtaaaagttcggaaatattcaaatttcactatgcaaaagaagtgtatcttgttataatttgattaatatcatacgaacactcatataatcgcgtggatatggcacgcaagtttctaccggtcaccgtaaatgtccgactatgagtgagcaatggaacggctttattcggccgttgcgtgtagatcattcggcattgcttgctctttttttggagagcgggcaatgctttttttattttttataagcgggggtaatcattgtggaagcattaaaacgaaaaatagcagaagacggaattgttctttctgatcaagtgctgaaagtggattcttttttaaaccatcaaattgatccggttctcatgcagcagatcggccgggaatttgcgcgccgttttgaaaaagacgagataaccaaaatcgtcacaattgaatcttcgggcattgcccctgcggtgatggccggccttgaactcggcgttcccgtcatctttgcgagaaaaaggaagtctctcacattaacggatgatctgctgacggcatccgtctattctttcacgaaaaaaacagaaagtcagattgcaatctccggaaatcatctgtcgaaagatgaccgcgtgttaatcattgacgactttttagcgaacggacaggcggcagaaggacttttatccatcgtaaaacaagcaggcgcagcggtttgcgggatcggaatcgtcattgaaaagtcatttcagccgggaagagatgagctgatgaaaaaaggatgccgggtcgaatcactggcgagaattcaatcgcttgaagacggaaaagtgacatttgtacaggaggtccgttcatgaaaaacggctatgccaaaacactttcactcggtatccagcacgtgcttgccatgtatgccggcgccgtcgtcgttcccttaattgtaggagcggcattgggactgaacgcagaacagctgacatatctcgtatcaattgacatttttatgtgcggggcggctacgctgcttcaagtatggaggaataaatgtttcggcatcggcttgcccgttgtgctcggctgtacgttcaccgcggtagcgccgattatttccatcggtaaggagtacgggatttcagccatttacgggagcattttggcatcgggtctgcttgtcattctgctgtcgtttttcttcggcaagctcgtatcctttttcccgcctgtggtaaccggatctgtcgtgacgattatcgggatgaccttaatgccggtcgcgatgaatcatattgccggcggggaaggcagcaaggatttcggtgatccggctaaccttgccctcggatttacggtgctcgtcatcatcgtgctgctttatcggtttacaaaaggatttttgaaatccatttcgattttaatcggcattgtcatcgggacggccatcgcatattttatgggaaaagtgcaatttgacaatgtggcgaatgctgacgcaattcaaatgattaaaccgttttacttcgggacgccgacatttcatgcggcaccgattattacgatgtccatcgttgccattgtcagccttgttgagtcaaccggcgtctatttcgctctcggtgacctgacaaaccggcgcctgtctgaacgtgatttagcaaaaggctaccgcgcggaaggcctggcggtattcatcagcggcatttttaatgcttttccgtacacggcttattcccaaaacgtcggcctcgtgcagctgacaggaattaagaaaaacgcggttatcggtgtcacgggcgcacttttaatgctcttcggcctttttccgaaaatcgcagccttcacgaccatcatcccgtcttccgtactgggaggcgcgatggtggccatgttcggcatggtcatctcctacggcattaaaatgctcagtcaaattgactttaaaaagcaggaaaaccttctgattgtcgcgtgttcggtcggattgggactcggtgtaaccgtcgttcccgatatgtttaagcacctgccgtcttacttaaatctgctgaccacaaacggaatcgtcgccggaagctttaccgccgtccttttgaatattatttataatatgattcctaaaacgaaaaaaacccttgatgtgacaagggttcaagagggttagtgatccgttttctttaaaataacatcttattttatccagatcgaggatgcttccgaaagtttgctgaactttttgcgaggcatcctctttcatttattattttcattgtttgaaaagaaacaaattgagtgatgaggcatccgccttttttgccgaaaaaccgtcccgaactatatgtacgtgaacgagtatcttgtgcacggatccttacaaatgagagtgaaaagaagggaaagccccttcttttaattaatccatccttcaaaagttgcgcgatagaacccttcgattatctctactttcttaaggtaatatgtaacaccattcttaacagttgtatttgggatatcccatctatgaaggtaatccattgtaaaagaatctttggtcgcttgtgtcgaaatttttgtttgagttgagtcgctatttgtattgccagggctagatgcaaaagcaggggcagcggaaacgagtaaagcgagagacaaggcagaaccagttaaaactttttttaatttcattttgaacactcctttgttttttaatacacttgtattattacatacaatacaaaaagaaccaagggtttttttgttaatattttgtgagcgtgaatttagttaggggagtggatggcgataggagcgatgctttcattcactgttgcggcttatttcagaatattgataagtatatagagaaaaagagttgaatattgctggcttctggtgagctgcagcctttgagtcagtgtttgctttagctattccagcgcttttccaacggggaaggtgcgatatgaaatttaacactgaaacaattgtacaaaagtaaaatctttatttaaaatgttataaatgcgaattttcaatataggaggttatctgatggcagaaaagaaaaaagctttaatcattgtggatgtacaaaaagcctttgatgataaaaagtggggagaccgaaataacgtaaaggcggaagaaaatatcagcaaaatactgaaattatggagagaaaaaggatggacagtcatatacatacaacatatttctgataaacctggttctttattttatccaaaaaatgagggggttgctataaaggaaatcgttaaacctatggaaaaagaagtcattataaccaaaaaagtaaacagcagctttattgggactaatctagaagagcttttaaaagcaaatgatataacaactgtcgtaatcactggcttgactacgccgcactgtgtttcaacaaccacaaggatgagcggtaatttaggatttgatacatacctgatttcagatgcaacagcagccttcggaatgagagatcaaaatgatacatattatgatgcagagactattcacaatatatctctggcaacattgcatgatgaatttgccacaatattaacgactgatcaattaatcaatgattttataaaaacaaactgactaacattatggctaagggcggcggtagggataggcggctgaaaagcatattcaggcgcatacaaggacctcgtcggaaaatacggggatcacgattgaaaaaaaggcatctgtttcagatgcctttttgtttgttgcggtcaacggtttgattcggccttagttttgaatagtaaaaaggctttaccaatcagcgaattattcaaacttttttggcttgtgctgagtctggtgtcttttgatttcctcgaatagattggcttgatcatctttttgaggctgaggctctttgttaagacattttggatcgatcacatttttaagatctttgatggttaaaggcttacagtcatcttttaattcgtagcctaattgtccattagcttctaaagtggcatatttaattgtgtttatatctgaaatgccaagaagtcttaaacgcatttcgagttgatctgctgtcagtctcagcttctttaagttttctatattgagttggccgtcttctataacgaatttagattttccggttaaaaaagattcaatccagtttacttttacttgaaaccattccatcaaaatcaaagcgctaaaaaggatagacgcagcgattaatgttttcaataaactagtttctaaaatggggtgaacgataatcgtaccgattgaaatcatcaccattgtctgtgcaatggtcatttgtgcaatggattttctccctgaaattctcagtaaaatcattccgaatgcaattataattaattcttcccaagcaaatctcatgttatcactctggattgtgttttatcaaaaataaaagagcaagtaagaggttttatggggtacttgctcacgaagaattattgcccttacatttaattttattcattttaggtgttttcctaactggagaaactattctgcgagggtgaattcatttcggaatctccaatacaagaggcggcggtgaatattggtggctgaaaagcacaccaaggagtataaggagtgcgtaaggcatgaaatagaagaaccttgccaagaaatacgagttgtcaattaacacaattaagtcataggaaaagcggcatggttgggaacaaaaaaggatgcatactgagacattctgctaaaatgcattgaggaacaacggtctgctgctgagacagagcttgaaatacggttgcttgggatcgccgcacaacgttcttcgttgatcatggtttttaggaggttagtagggaaaacaactatgaaaaaagggatgagagaaaaatctcttatcccttagataatcttaaaaccaaccttggtattcaccagtccatgtgccatcactgttctgcttggcatcttttaaatagtatttaactccagcaaatactgttacattaagaagttctccacgtgtattagcattgatgtatatagtttttaacactgcctgaggagctgcagttttatgactcccgccatctgcagtcgggcttgctgcaaaagcaggagcagcagaaacaagtaaagcaagtgatagagctgaaccggttaaaacttttttaaatttcatttaaaacactccctttttttatttgatacaactgtattatataactgtatgtaaaatttgtccatataaacttatgttaactttttgtgaatataagaaagtattttccaccatgagttttattaactcgtatcatcttattttaagcctccagagtaaggcatcatcatatgacgtcaaaactgttgtatgatactagggaaatcatttttagtcgaaatggggagttgcatgacatttacggaacgggcggtagccattatcaaacagattcctgaaggaaaagtgatgacgtatggtcaaattgccgatcttgcgggaagtccgcggggagcgaggcaggttgtgaggattcttcactccatgagtaaaaagcatcgtcttccttggcacagggtcatcaatgcaaagggcgaaatcggattgagagacgaagagatgttttctgtacagaagctgtctcttgaagctgagggggtagcggtcacgtcagacggacggatcgatctcaatttatacgtatatgatccgaatatgtaaaaaaacctgccatatatcggcaggtttttcagttatatgctttgagccggccagaaaggttttgccggatataaggccattcctcccgaaggatggagtagtaggcggtatctctgagaccgccgtcgacagccggaatgtgtgcgcggcggatcccttcaaattgggctccgatccgcaaaatcgcagtccgtgagcgctggttgcgaacgtcggttttcagcgtcaccctgacagcttgccacacgtcaaacgcatgagtcagcatcagaagtttacattccgtattgacaccggtccgctgcacggcagaggcataccatgtgctgccgatctcacacacttccggagctgcgtccgccggccgcgtaaacacttccgcatccataaaccgcgtgcttccgacgattcggtctgtttcaagactccgtactgcaaaaggcaatgcaagtcctttttcataatcggaaagcgcacgctcaatataacgctttgtttcttcgattccgtcagggacatgggtgtaagcgtaagtcgtcctattttctgaagcagcgtcacaaagtgcctgagtgtgatcaatcgtcatcggctctaactgaacgagtgaccctctaagaatgacaggcttcagcattcttatcacaaccttttttatgaatggatcaagtatagccgaacggtttcttattcaaaagggccaatttcctattaaaatggcatgtcagtgaaatcctcgattcaaacttatgcatacattcaggaaaaaagcggaaacctttatgtaaagaggtgatgggcatggcatatgtgttatctgtcggaacgagcattccaaagtatcatgtctcgcaagaaacggcggcggattttgcgagagggatgtttgccgattcatttaaggatattgatcggctgttaaaagcctttcaaaacggcgaaattgaatcaaggcagtttgtccggccgattgaatggtataaaacggcacggggtttttcagaaaaaaaccggctgtatacggaagaaaccgtcaagcacagtgcggatgcggcacttgattgtttaacaaacccggattgtttaacaaatccctttccatatgaaaaagtggatgcgatcttttttatttccagcaccgggctttcgacacccagcattgaagcgaaagtgatgaatcagcttccgttttctgcgaaaacaaaacggataccgatctggggcttaggatgcgcgggcggagcggccggcctgtccagggcgtacgaatactgccgcgcgtatcctgaagcatacgtgcttgtcatcgcggctgaactctgcagcttaacgtttcagccgaacgacaagtcaaaaagcaacttaatcggaacttccctgtttgcggacgggattgccgcagtactaatgggaggagaaaaggcgaaccgaaacgacgtcaaacagccgcttcttccgcggatattcgccactcaatcggtgatgatgccggatgcggaagatgtgatgggctgggaattcaccgacagcggttttcaagtcattttttcaagagacattcccaccctggtttcacagtggctgaaggacaatgttgatgaatttttatttgaatatggtgtcagtcctcacgacattaaaacctttcttgcccatccaggcgggaaaaaggtcattgacgcctatttaacgagtctttcaatgggcaccgggcagcttgcggcatctcggaaggtgctgcaaaaacacgggaacatgtcttccgcaactatttttcatgtgataaaagaacagttgctcaacggacggcagaaagaaaacgaaaaagggctgatcggcgctctcgggccgggattttcgtctgagcttttgctgttcagctgggaaaagggggcttcttaatgttttggctgtttatcatgctgcttgcggcccagcggattgcggagatgatcgtggcccggcgcaatgagcaaaaggtgaaaaagcaaggcgcagtcgaatacggagaaggacattatccctttctcgtcctgatgcacgtgctcttttttgtctctcttacagctgaggtggcggcgtttaaaaaaacgctttctccaaggtgggccgccattatatgtatcattttatttgtacaggggatcaggtattgggcgctattatcattagggcggtattggaatacgaaaatccttgtcgtgccggatgcggagcttgtcagaaaggggccgtacaggtggatgaagcacccgaactacgcggtcgtcatcttagaatttatttttctgccgctgttatacggagcgtattggacactgtttctcttttcgattctcaatgcctgcatgctcactgtgaggattcgcgccgaagagaaagcgctagaagaaaacaccgcaaaatagagattgaaaatcattctcactcatgataagatataaatatgaaaatgattctcattcaaggtggtgccaaaaatgacaatgttatttttatttgcagccgtttgtacatacagtgttttaattggtttcgtattgaaaaaagtttcgaataaatcgatgtcttcttaaacatctgcggtttttcctgccgcgggtgttttttctttatcagctgccgatatcggcggcttttttgcgtttcctgaagaaaagtgagccattcttgtgtaaaatgggggagaggtttttttcagagctttctaaaaatgaaaaacgtcatttgatgcgacagacacaaaggggtaaagacacatgacagaagaagaacgccataacagggagattttcagcagaacgggtgccttatacgcacaatttttggatcatcaggatgaaaaacgggccgatcagctcgcggccattatgaaaaaagcggctgatgaagaggtttatatcgcgtttaccgggcattattcggccggaaagtcctctttattaaacacattgctcggtgaagacatactgccgacaagcccgattcccacaagcgccaacctcgttgtcatccggcacggtgaagataaagtcgtgcttcatacgacggacggggcttatgcagagatcaaaggaagttacgataaagaacaagtgcagcaattctgtaaagacggtgagcaaattgaaacggtggaagtctatgccggctttaaggagtcagagccttatgcggcctacattgacacaccgggaattgattcgacggacgaagcgcattttttatctgccgcttcagttctccatcaggctgacgctttattttacgtcgttcattataatcacgtccattcagaagaaaatatgctgtttctcagctccatcaaagaccgtattccgaatttgtttctgatcgtcaaccaaattgacagacatgatgaaactgaaacgaagtttgaagagtaccgcaggcaggtggaagacatgcttgaaggcgcgggaataccgaaagaatcgcttttctttacgtctgtcactgagcctgaccatcctttaaacggcatggaacagctgaaaaaacatctgcagaagctgaaacagcaggcaaaaacaaatttatggtccttaacggagagaaatgtcgcacacttagtcacagagcatacagagatgctcgtaaaagaagataaaaacagcagcggagagcagtttgacaaacaagaagcacttgtccgttctgttgaagatgagcttaaacaagccgttcaacaggctgaaacagcagagaaagacatcagaaaagacgtgcagaacatactgcaaaacgctaatctgacaccctttgagatgagggagcttgcatctgcttatattgaatcacagcagccctcatttaaaaccggattattcttttcaaaagcgaaaacggcttcggaaaaagaaagaaggcgtgcagaattttttgccgatattaaaaaaagaacggaaggggaagcggattggcatattatcgacacatttacgaaagctgccaagcggtatgaagcggattcggacgaactgatcaagaaaatccaggcgtaccgcacaccgctttctgatgatatcaccgctcaggcccttaagcagggagcggccttttcatctgaatacgtattaacttatacgaaagacctcgctgaaatgatcagaagggaagccaaaagacagacagcggaactcattgaggagctgaccgcttatgttcagacaaaaaacggaccgctcattgagaacttgaaaaaccggctcgaaaaagaaaagaaaataagagatgagctcgcgcaatcggcaaaagaagaacgcaatgccttggaaaaagcagcccgcgtccgtgctttgtgggaagaagaattgacctgtgatacgggaagcggcgactggtatacgcgaaaaaaacgccttgcgaaagtgcccgtccaaaaagagaaaccaaaagaggctgtacagcatgaagtaagcaagcccgaaaaaaatgcaatgaaggaacttcctataaaagagcagactgatcggttctatgagcttgccgggattcttgaatcctcaagcattttaggaaaacaggcagaagcctttcgaagcaggattgagcggcttgaaaaccgccagtttaccttggcgttattcggcggattcagttccggtaaatcatcatttgcaaatgcgcttgtcggtgaatacgtgctgccatcatcaccgacgcccacaacggctacgatcaacaaaataacgaaaccgcaagacggtaaaccgcataaatctgcggagatcgtttttaaaacggaggaggagctggatgctgaaatgcttcagctgactgagctgaaagatgctgatgtaaaggggcgttcactgaaagagagatggaattatgccattaaaaagggaaaagttccggatgaactcatcccggtaattcagacgatgctgcaggcgtttgatacgtatgaagaacagatccgtcaaaggctgacactgacggtgccggttgaagatttaaaaccgtacgcagccgaagaaaaaacggcctgctgcgtaaaagaagtcaccgtgtattatgattcgcctctcacgcaaaaaggcatcaccattgttgatacgccaggagcaagcagtataaacaagcgccatacggaacttgcctttcaatatataaaggatgctgacgcgttcttttatatgacgtactatcagcattctttttcaaaaggagacaggtcttttctgaagaaactcggcctcgtcaaagaatcattcggcatggataaaatgttttttgtcattaacgccgccgatctggccaaaaccgaaagcgagctggaaaccgtcaaagactatgttcgctcagaactctcaaaagagggaattaaccggccgaaattatatcatgtctcaagtaaagaagagcttgcgggtaaaaaagcaactttttataacaggttctctgatgtaagaaccggacttgagcactttattgaggaagatgtaatgagggccagctgcgcccagctgaaaacagaggcggacaaattgtgcgatatggtggaacagcttcacgaatctcttcaccagtcggcagaagaaaaagagaaaaagaaacagcgtctggagtcttcctatgaaaaagctctcgctgacatttcaaagcgccgtacgtctgaggtcatcattcgaaaagtgatgaaagatacggaagaacagctctatcacattaagcaccgcctgacgttttatgcgaatgatatgttgaaaaccgccttccatccgggtcttcaaaacggtgattggaaacgaaatatatcagcggcgctgaatgaggcgctcaaggaattccgttttgaatatattcaagagctgaaaacgctcgatatccggatgaccggttttattgagcgccatatgactgaggaatggatggaaaactgtcagaagaagcttatggaagacggagatttctccatttatgtgagcggtgaaaacgaatttgccgttcagctgaaagaggtcgctccggtcattgacgtctcagcattctcacatcacgtaaaggaagttaaatcaccgaagcagttttttgaacagaacggaaaagcagcgtttgtagaagggctcaggcttagcctgcaaaaagtgacagaaaagtggcttgagcaggagaaagaaagcctttcagagcgatatactgagcaggtgcgccgtctgcaagaagacatggcggataaaagcctgtcccagatccgcgagcagcgggacacttatttacaaggccttgcggaaaatacgagtgcaagggaaattgaacacctttacgaagccgaaaaagcatggaaaaagaaagatgaaatgctgaaaatttaaaaatccggttggcgggcagataacagtcgtggtagactaaaatgaaaaaaagcgagatgaaaccttttatgtcagaagtccataaagcaatttcaacacattccgcaaaacagcatcagcatgtcaaaacatttgtacagcttgattatgagcgtgaacaggccattgaagaagccattgtaaaatgcagacagaatcaaccgttcacgacagatgccatcaatggcatcaccgcaaaaatgaaccagctggcgaaaaagggcatcgtgccgcaaagacgattcgtaagtgaagagatggtgaaagaattcgtcagcagacagtaatggatgaacctgccgcgtgtgtcatcagcgcttgctgtacatactatccgtatcttctctaaagggggatatgaccatgggcagaacaaaactgggaaacagaaatgctcagcagaataacaatgccaaaaagaaaaacggcttcggacagaaatttgattcttatgccggccgtgaagctgaaaagctgatggcaagcaataaaagacacggtgaataacgtgacggcagcatcttccaaatggggggatgctgtttttttaccgccttctttggtaaaataggaacattgaataaaaaggagtttcgatatatgaataataaattactgctcgttgacggcatggcgcttttgttccgctcgtttttcgcgacggccgttcatcgcaattttatgataaatgaaaacggaattcccacaaacggagtcaacggttttttaaagcatctaattacggcggttgatacgtttcagcccacacatgtcgtctgctgctgggatatgggaagcaaaacgtaccgcaatgatttgtttcaagattataaggccaacagaagcgaaccgccgctagagctgattccgcaatttgatctagcgaaagaagcagcgcgagagctcggttttttaaacatcggcataaaaggctatgaggcggatgactgtatcggtacgctttctgccctattttccggggaagcggaaattacgattgtaacgggtgataaagatctgcttcaattgctgaatcatcaagttcaagtagcgctgctgcaaaagggtatcggcaattataaggtatatacagatgagatattcagagaagaaacgggagttccgccaaaagcgctgattgacattaaggcgctgatgggagacacgagcgataactatcccggcgttaaagggatcggggaaaaaacggcgtacaagctgatccgtgaatatcaaaacatagacagcttattagaaagcctcgctctcttgccgaagggccagcaaacgaaaattcagcaaagcttgaaagaattggagctgtcaaggcagcttgctgaaatacattgcgaggtgccgttagtctgtacgcttgaagaagcgcttttttcattaaagatggaagaggcggcattaatgctcagacgtcatcagataaaaggaattgaaaggatgctcgaaaagctgaacgccagagagatcagctgatccctctagcgttttgtattgcttttttttgcgttgttttcaagggctgatttcgggtctttatgcgcatttccttccatatttccctgaggattcacgcccccggtcagccggcctttattttcttttctcatagctgttcacctcatttgtaggatgaacagtgagacgcaatttcattccggttatttattcagccgaatcgctttttttgcgagctgatcggctgtttggttttgtctgccgggaatccacttaatgaaaaacaatggaaattcggcctttaagcggatgatttcgtcaacaaacggctggaaagccttgtttttaaccgcttcaagatctgcggcccgctccacgatatccgaatccgtccggaatgacacggactcaaatccgcgggcggcacacagcttcattccttcaattaaagcgagaaattcagcttcctgatttgattggtcgccgatcggaattgagaaagattctgttttcccgtcatgtttaataaaaataccgataccggacgggcccgggtttccggcgcttgcaccgtctacataaatttcagcgggcatcatccgtcactctccattcggtgtcattcgttttgccgcatacgcataagggacagaaatgagtgataccgcaaatttaatcaggtaagttgaaatgaagatgctgaaccatactcccgcggaataaacgccgataaaggccacggcagtgaagataaatgtatccagcagctggctgagcgccgtgcttccgctgtttctgagccagagaagcctgtctgaaggaaagattctccgaatggctgaatatacataaacatctatcgtttggctgaaaataaaagccaagaggcttccgagcgcaacacgcggcagaaaaccgaaaatcgtctcaagggcaggctgtgcgatatctgatgcagccggtttatataaaagagccccctgcatggcgcatgtcaaagcgagcagagtggaaaacccgagccagacggctttgcgcgcttccctgggaccgtatttttcattcagcacatccgttgcgaagaaaacggtgccgtacatgatatttcccagtgtcgccgtaagcccgaacagctcgactgttttgacaacctgcaagttggcgcacaccgtggcgaaaccgatccatacgaataggcccgttttgccaaatcctttataaaacagaagaacaatgataaaatgaatgaccgcaaataagatccataacacatcgttaaacaaaacctgctgacttcctttcaatttgagaatggtttgattatagcacacgcccgtcaactaatgaatggtaaggtgatttcaatgaatcttaagccgtatatcgaaatagaagcaaaaggaacaggccctgtcgcgtttttttccgaagattggctgaccgttccgaaagcgcgcatgcttgcaagagaagtcagccgctttccttatataaaagacatttattttgaggatgaaaaaggcgcgagctggacgcttaaagaattagaaaagcttactgaagagcttgcgcacgaacctgacgacattacagtgtatttcgacggcggctttgacaaaacaagcggacgcgccggactcggaattgtcgtgtattattctctcggcggcaagcggcaccgcatacgaaaaaacaaaagcttaacgcttcagacgaacaatgaggcggaatatgccgctttgtacgaagcgcttaaggaagtgcaggaacttggcgcaagcagaaattcaatcacgataagaggggattccctcgtcgttttacatcagcttgacggcagctggccgtgttatgatgaaacgcaaaacgaatggctggataaaattgaagcgctgctcgaatccttaaagctgacaccgacatatgaagccgtaaaccgaaaggaaaatcaagaagcggatgaccttgccagaaaaattctctcggaccggcagattgaaagccgtataacattagaaggtaacggagatgactgatattggataaaaaaagcatttataaagaattgacagagcttcaggatgaatattgcaaagactgtttcgtaaaaaagcatttccgcaaagagtttggaaaaacgcacgctcattctttctgcatcaagcaatgcacggtgggggagaagctgaaagcctacggcaaggtgctgacaaatcaataaaaaataaaaccgcagcttctgcggttttatttttcgaattcatcgagctgatgctggcaatcgtcgagaagcattcgctgcttttgcagaaaatcctggtcgagagcttgcagttcactggattgtgacattgttctggcatcctgaatcgcctggtaagcagattccaccaaagttgaattttggccccgggtagccgctcccgttgttttctgggccgtttccaccgctaattcaagctggcgtttatccgtcagtccgtttggaaaaaattcagagtccattaaaaaacacctccgcaaatagtttggagatttttttttagaaatatgtacggaaaatagaaaaaaatatagaaaataagccgatataactattgaacctgattaattagggcttatttactattattcagggtatcttgggagagaagggaaaaaccagccgtgaatgataatgatttaaaaacaatccttcagcagacatttaaagaaatatacggtgatttgggaagtttagcaaaaatggcgaaaaaaggaatgccgtcaatggagaaacaaattgaagaaatcgagcagcgctgcaagcagaatcttgtcgcaattgagattcagacggcaatcaaataggagaggcatacgcctctcctctatttgtcatctgatcaacatgtattgagtttagagttttacaacattagaagcttgaggtccacgattaccttcgacaatttcaaaagaaacttcttgtccttcttctaatgatttgtatccttctccttcgatagcagtgaagtgaacaaatacgtcgtctccgccttcaacttcgatgaagccgaatcctttttcgttattgaaccattttactttaccgttttgcatattgcttaattcctcctagtactgtagcaccttcgtgctaaaaaaaattttgtcatcatccaaccgtacgtatgtaaacgttgttaaatgatggttcaactatacaccatatgggagcggacgtcaagcagccgctccctattttttatctttatttttccagtcacaaagcttaaccggaaaaaaacaaaaagcacacgaatcgttcgtgtgcttttcttttacgataatgccatatctgccttcccggccatcatttcagattcttttataatgtcctgcaaaatgacttcagaagagttggggaggtgaaggcttttaatattgtccttcatccggttcagcttctcctcatccgcaagaagggaggtgaccgactctaaaatttcttcgtggcggttgaccacgacagccgcaccgcgatcttcaaagaaaatggcgttttctttttcctgtccgggaaccggtttgtacaaaataacgggtactccgatcgccgttgcttccgtcagtgtgatgccgcccggtttcgtgatcatgcagtctgtaatacggaacagctcgtcaattctttctacatagcccagaactttcagccggtcggcattgtcaccttccaagctgctgagggattctttcagcgagctgtttttgccgcataccaccacaacctgcacctgatcgtcatgaacgagattttcgcacagttcttttacgtttttcagcacaccatgcgctcccgccataataagaagaacttttttgtcgggagagagattgtattttttataaatcggctctttcggcatcgattcctcgaattgaggcctgatgggaatgcccgtgatctttacgttgttcgggtgagtgccgatttcaatcagtttttccttcacgtaatctgtggcgacataatatttatcaacattttcatgaacccagattttgtgaaggcagaaatcggtcataacgttgaacgtcgggatcacttttccggttctccgtctgtattccggtacgacaatcatcggaaatgtattgataataatgtccggcttatgctcttcgacgagctggcctaaacgtttatttcccattttaaaataaatattgaatttgcgtttattatagattttgtcaactccgtaataaaacaaacgataaaactgtttcccgattgagaagctttttaaataaaggtattgagtaacctctgaaacaatcggatttgactcttgatacaaattggaaaccgtcacatctaagccgagacgcagacactgttcgtagagcgttttggccacttgaacatgcccgtttccgtaatttgcagtcaaaattaatacttttttattggtattcaagtaaattcacctcaatgtaatcaacaacaagcaagcttcatgcatcgtaaggagttattgtctatagataaacataacacaagtgcatcattttataataagcgcggcaacatatttaaactaaatttaattgatatgttccattattttaaagttttgttatacgcatactgaatcaagagtattttatcatatttttgtcaccgtatcactcaaaacaaaaattaatcccattcatacggggtttcctgatatacgtaataattcagccaattcataaacaataacgttgcatgagctttccagcggttaacaggttctttcccgccgggcgcaaaatagtgcttaggagcttctacgtttgaaagatttctctctatgtctctctcatactcctgaagtagcgtatcggtatcatattccggatgacccgttaagaaaatctgtttttcgtcttttgaaacgattaaacagacccccgcttcctctgaaacgctgagcacatccagatccgaagccgattgcagctgctccgtattaatatctgtatgccgtgagtggggcacatagtatagctcgtcaaatcctcttaccaatctctcatgttttttaagaacggtatgctcaaacacaccgaagatttttttcggcagctccactttctcaatgccgtaatgatagtataaaccggcttgagcgccccagcagatatggagggttgaagtgacattcgttttgctccattccatgatttccttcaattcttcccagtaagaaacatcttcaaacggcaggtgctcaatcggagccccggtaataatcattccgtcaaaccgtttgtggcgaatgctggaaaaatccgtataaaactcatccagatgctgccttgccgtattttttggagtatgtgtgctcggaattaagaacgtaaagtgaacttgtaaaggtgaattcccaagcatcctgaggagctgggtttccgtttggatttttttcggcatcagatttaaaatcacgatcttctgcggccggatatcctgatgaaaagcccggctttcatccattacaaagatgtgttcactttcaagcacctgcttagcgggcaggtgatttggtatattaataggcaacatgccacctccgttattccccgttaattttcttcattatagaaatttttaagccatttttcaatccatcccggcgtaataaaccgcatttaacgcataatgacggggataaaagcggcaaataggcataaattcggagcggctctttattatgacgggtaaagagccgtttggttcctcgaaaaaaacgttttccgttaagtggaaggaaaaagcggttgccgtttgttttgcagtgtaaaacaggtaaaataaatgaagaatgtaaaaaggagggccgcagatgacaatttacgatataaacgtacggaccataacaggcgaagacatgacgctatcggcttacagaggcaaggtgatgatcattgtgaatacagcaagcaaatgcgggttcacatcccagctcaagcagcttcaggagctctatgatacatatcgggaggaaggtcttgaaatattgggatttccctgcaaccaattcatgaaccaagaacctggaaacgaagcggaaattcaagatttctgtgtgaaaaactacggagtcacattcccgatgtttgcgaaagttgatgtcaatggagcagacgctcatcctctcttcacatatctgacggaacaggcgaaggggatgctcggcacaaaagcgatcaaatggaatttcactaagtttatagtggatcgaaacggtaaagtcaccgggcgtttttcaccgaatgtcaacccaaaagagcttgaagatacggtgcagaggcttttggccgataagaggtgatacggtgaacgaaaaagagcagctggaaagcgtcaggaattgggtcagagaaaagcttatcaatgaacgaacgggccatgactggcttcatatttcccgggtcgcaacactttctgtttatatggcaaaagaagaaggcgccgacttatttatcactgagacggccgcgctggttcatgatctgattgacgccaagctcgaaaaaagcgaaaggctgacggcaggcgaagtgacagaacggctggctgctttcaacattgcggatggctccattcaggagatcgcggatattatcacgagaatgtcattcagacacagggaactgctgataaagcggccgctttcattggaggggaaagttgttcaggatgcagacatgcttgatgcgatcggcgcagcgggcatcggcagggcttttatgtttgccggggcgaagggtcacccgatgtacggaactcaaacaagtgtgctggcccatatagaggataaattaatcaagcttaaaggcttaatgaatacaaaagcgggggccggtttagcagaggagcggcatcaatttcttttgcagttcgccgcccgtatccaaaaagaggccggcatttgcaaaagctaagcggcgcaatagaacgcttgtgccgactatgttagaataagtgtcagattgcgcataggaggaccaatatgaagattaaatcaatagaaccgacgccgagtccgaacacgatgaaagtgattttgactgaagagcttccggcagggaaaagcaacaattacaagcccggtcaggcagatgatgctccggctgtcgtacgtgatattttaaacattgaaggagtaaagggcgtttatcacgttgccgatttcctggctgtggagagaaacgcccgttttgactggaaggaaattctgcctcaggtccgttccgccttcggaatggaacatacggagcagtctgagagccgttctgaacaggaatcgttcggtgaagtgaaggttttcgtacaaatgttcagcggaatcccgatgcaggtcaaattgacggacggcgaacgtgaagagcgcttcggccttccggaacgtttccaagaagccatcttaaagctgcgttccgaagcttcaaatgttgtatttgagcgggcttggaaagaacaaggcgtgcgcttcggggattttaccgaaatcggacacgatgtcacagaagagcttcaggccgcctacagtgatgagcggctcaaacgcctgacagaagcagccgcacagcaaaagggtgaggccaaacctgcagtgcagcggaaagcttataaagtgactttggacatgctcgatgatgaagactggaaacagcgctatgcccatcttgagcaaatggatccggatgaagacgatttaccagtattggaaaaggcgctgtatgatccgaagacttcgatcagaagacaagccgtcgtttatttgggaatgatcgaaaagccgtctgtgcttccgctgttatacaaagcgcttgaagacaaaacggtgacggtcagaaggacggcgggtgactgtctgtcggatcttggcgatgcgagcgccatcccggccatgacgaaatcgctcagtgactcaagcaagctcgtgcgctggcgcgcggccatgtttttatatgaggtcggcgatgaaagcgcgctggaagcattaaaagcggcggaagacgatccggaattcgaagtcagcctgcaagtcaaaatggcgattgaacggattgagcacggagaagaggcgaaaggttcagtctggaaacagatgactgaaagcagaaaaaaagaacagttataacaaaaaggtgcgcccatgcaccttttttatttgaattcactttttataaaaattatttagaatattgttgaaaaatgattcaaaactctatatagtaagtacaatattaattgttggagggtttttatcgaaatacagaaagaatagaaaagcgagacagggcaaagacactgtaaaatttgcagaacgcgccctagaataaactgaaaattttaaaaatagtgcacagtctaaaaacagtagggggatcaccatggcagaattacgcagcaacatgatcacacagggaattgacagagcgccgcaccgcagccttcttcgcgctgccggcgtaaaagaagaggacttcggtaagccgtttatcgcggtctgtaattcatacatcgatatcgttcccgggcatgttcacctgcaggaatttggaaaaatcgtaaaagaagcaatcagggaagcgggcggtgtgccttttgaatttaacacgatcggagtagatgacggaatcgcaatggggcatatcggcatgagatattcgctgccgagccgcgaaatcattgccgattcagttgaaacggtcgtctcggcgcactggtttgacggaatggtctgcattccgaactgcgacaaaattacgccgggaatgctgatggcggctatgcggattaatattccgaccatttttgtcagcggggggccgatggcagccggccgcacaagcgacggccgcaaaatttcgctttcttcagtatttgaaggcgtcggcgcatatcaagccgggaaaatcggtgaaagcgacctgcaggagctggaacagttcggctgcccgacgtgcggatcttgttcgggcatgtttacggcaaactccatgaactgtctgtctgaagcgctcggtctggcgcttccgggcaacggaacaattctagcaacttcaccggagagaagagagtttgtgagaaaatcagcggcccaattgatggagaccatcaaaaaagacattaagccgcgcgatatcgtcaccgaaaaagcgattgacaacgcgtttgcgttagacatggctctcggcggctcaaccaacacagtgcttcatacgcttgcgcttgccaatgaagctggggttgagtactctttagaacgcattaacgaagtggctgaacgagtgcctcacttatcgaaattggcgccggcctcggacgtcttcattgaagatctgcacgaagcgggcggtgtgtcggctgcccttaatgaattggcgaaaaaagaaggggcgcttcatcttgacgcgctgactgtaacaggccacacactcggagaaacaattgcgggtcatgaagtaaaggattatgacgtgattcatccgcttgacaatccgtttaccgaaaaaggcggtttggccgtcctgtttgggaatctggctccggacggcgccattatcaaaacaggcggggtgcaggacgggattacaagacatgaaggccccgctgtcgtctttgattcccaggatgccgcgcttgaaggcattataaaccgcaaagtaaaagaaggagatgttgtcattatccgttatgaagggccaaagggcggcccgggcatgccggagatgctcgctccgacgtctcagattgtcggaatggggcttggcccgaaagtggcgcttattacagacggccgtttttcaggagcgtcccggggcctttcaatcgggcacgtatcgcctgaagcggctgaaggcggcccgctcgcattcgtagaaaacggcgaccatgtcatcgttgacatagaaaaacggattttggacgtacaagtgcctgaagaagaatgggaaaaacgcaaggccgaatggaaaggcttcgagccgaaagtaaaaacaggatatctggcccggtattccaaactcgtaacaagcgccaatacgggcggaatcatgaaaatataaaacagaggcctgaacaattgaattccggccccctctatagtatccttgacttcatataaggattttagagggggcttttttatgtcaatggcttatgaagaatatatgcgccagctggtcgtgccgatgcgccgtgagctgacgggtgcgggttttcaggaattaacgactgctgaagaagtagaaagctttatggaacaggcagagggcacgacattggtcgttgtcaactccgtgtgcggctgtgcagccggtcttgcccgtccggctgcgactcaggctgttttacagcatgaaaaagcgcctgatcatacggttaccgtatttgccggtcaagataaagacgcaactgcaaaaatgcgtgaatactttacagggcaggaaccttcctcgccatcaatggcgctgttaaaaggtaaagaggtcgttcattttattccccgtcacgaaatcgaagggcatgacatggaggaaattatgaaaaatctgacggatgccttcgatgcgcactgctgaaatgcccgaattccgggcattttctttttggagaaaaagatgatcacaacgagttaccgaccaagcgaatatacgatacacacagcgcagtcactcagtgtcaggctgggtgacacttactgcagccgcaataaacagcccattgaaaaaatgctggaacgagcggctagcgatcttttagtcatcggaaaggaacggttcgaactttacacgaagcaagaggagaagttcttttttcacccgaatacagcgatgttccgcgcaaagcggtttttgagaggggaatccgagccgttgttaaaagcagccggattacgcgaaggggattcctttttagattgtacgctcggcctggcatccgatgcgattttggcaagcctggcagtcggaaaaagcggacaagtcatcggcctggagaaaaacaagcttgtctcattgcttgttgaaacaggacttcaaacgtgggaaaccggaatggagcagctccaaaccgccatgaaacgcattcaggtcaaacatgccgactgcgccgattatttgcgggagcttcctgattcatcggtagatgtcatttattttgacccgatgtttcacgaacctgttgaaacgtcagacggcattgcaccgctccgcgcgctggcagaagagggttttaacgaagagtgcatcacgcaagccgtccgggcggcgaaaaaatgcgtagtgcttaaagaccattggaaaagcccgcggtttgaacgatacggcttcaaggtgctgaaaagaaagacggcgcttttccactttggtgtcatccatgtgagctcatgatatcttgggcttctttttcgttaatcagtgatttccataacgacaaaataaagcagcgtgagaagtgatacagtcgcaaataaagcgttaatcatctcatcccctcctttttctccttcttattgtaagcggtttatccgctcggtcacagttaccaatttcccatattgcatgataatacgctgccggacatgacgccgcgctttcatctatgctaaaataaaggaaaagaggacaataaaacagaggggaacaatctgtcatgaaattgtggatgaaaaagacccttgtggttctgtttaccattgtaacgttcggactcgtgtctcctccggctgctttgatgacagacaagccttcaggacagtcgagcagtcttgagcagaatgattacaccgctttttatgatgaacacgccctgccgggagaagagaaggcagggcgggagcctgaattactgtttcaatcgtatcagcagcagcttctcggtgatgctgaaaatcaatcatttttaaaattcggcagcaaaatctctccggtcattgaagatgattacagaagtgaaattctgccgaaaatcgaagatgtgatcacaggacatttagccaagtttcaagatgatgaagcgtatcaggatgtggttatttccagcaaaccgtcggccggaaaaactgaaaaaatttttcatgtgtataacaggctgacgggtgaagatcttttaaggttccacgtccgccgggatcatcctccgcaagacggctactggtttaattttcattaccataccgctgaagacggatttcaatcacatcatgagctcggcagcatttactgggaccgcaatacgccgcctgactggatgagcgtgtaatagcgagaagaaataaaaaaatcatttctgagaaattttgcagaaatgattttttattgtgttacactactaaaagactactttaaaaggatgaaaaaaatgaaacaatataaagatttgtgccgtcatgtgttagaaaacggagaaaaaaaaggagaccgtacgggaacgggtacgatcagcacgttcggctaccaaatgcggtttaaccttcaggaaggtttcccgatgcttacgacgaaaaagctccattttaaatccatcgcgcatgagctgctttggtttttaaaaggagatacgaatgtccgctaccttcaggataacggagtccgcatctggaacgaatgggcggatgaaaacggagagctcggaccggtttacggttctcaatggcgttcatggcgcggagcggacggcgagaccatcgatcaaatctcccggctgattcatgacatcaagacaaacccgaattccagacgtttaatcgtcagcgcctggaatgtcggcgaaattgatcatatggcgcttccgccttgccactgcctgtttcagttttatgtcgcggacggaaaactgtcgtgtcagctttatcagcgctcagcggatgtctttctcggcgtgccgtttaatattgcgtcttatgcgcttttaacaatgatgatcgcgcatgtgacggggcttgaaccgggtgagtttgttcatacattcggagacgtccacatttaccaaaaccatgtggagcaggtgaatttgcagctgacaagggatgtccgtccgctgccgaaactgcggtttgcgcgaaatgttgattctatttttgattttacgtttgaagactttatcattgaggattatgacccgcatccgcacataaaaggagctgtcagcgtatgatttcgtttatttttgcgatggatgaaaaccggctgatcggaaaagataacgatctgccttggcaccttcccgatgatctcgcatatttcaaaaaagtgacgacgggccacaccattgtaatggggcggaaaacgtttgaatcaatcggacgcccgcttccgaatcggcgtaacatcgttgtaacctcacgggacgaatctttattcccgggctgtattaccgccgactcggctgaggaagtgctcaagctgatcccggcagatgaagaatgctttgtgatcggcggcgcccagctgtacagtgcgctctttccttatgcggacagactctacatgacaaaaattcaccatgtctttgaaggagaccgtttttttccggaatttaatgaagctgaatgggaattgacatcccgcaaacagggagtaaaagatgaaaaaaacccttacgattatgagtaccttgtatacgagaaaaagaattgagtttaagcagggggacaagaattgattcgttacggctgccttgtgatgtacgttgtatttatgttcatgaaaaatattcaggaatatatcaatcaaaaagagcttgacccgcggctttcttttcaaaaacagatgaggctggtgtatgagcggccgaaagcctttatgagaggctgcattgacgtgtcgggatcggcaatcggcattcatcatgatcagccgataccggacggccccgtattgtatgtgcatcccagattgcgcccggctgatcttctgctgcttgcgggacatcttgaagagccggctggttttatcgctggcgagaaagctttccggatgccgtttctcggaaattggctgcgtctgatgggtgtcatttgtggcggagacagccgggatgcagtgcttcatgaggcggaagtccgtctgcaaaaagggcaaagtctgattctgtccgaagacggcaaaatcaatccggaggaactggcccttcgtttcgacctcccgattgtgcctgtcagcacttcgggaacagaccggctgctgcggggcagattactgaaacggctgaaaccggctgacattgaattacatataaagcccgcttattatccggccggtcagaaacggctccgtgcataaaaaaagcacagtctctatagagaggctgtgctttttatttcagataaaggggactttgacgcaataaaataaaatacagaaaaacatcgaggcgctgccgcctaaaacaaaactgtgccaaatggcgtgatgatacggaacctttctccaaatataaaatattgtgccggcggaatacaataagccgccgaaaagaagaaggccgaaaccgggacctgacagcgaagcgtacagcggtttaatggcgacgatgatcagccagcccatcattaaatagacaagcgttgaaaaaatgataaaccgcttcacgaaaaagattttaaacacgatgcctccgatggcaagcgaccaaacaataattaaaagggtcagaccgagcgcccctttaaggggtcctaataaaaatggcgtatatgttccggctattaatacgtatatcgcggaatgatccacaatctcaagaatgtctttcgtttttttatgctgaatgctgtgcaaaagagtcgagctgagatacagcagcagcattgaagcgccgaagattgaaaagctgacgatgtctgtcggcgagccgtatttcaccgcgaagataatgagaaaaataagcgccggaatcgacagcaatacaccgattccgtgtgtgacggcatttgcgatttcttcttttattgtgaacaatcaaatgtcctcctttttaaaggatttgcttttgcagtgactgcaaaaagctcaacccttctaatgtaatttttgttccagcgcgtccacggccttttgtcacatagttcatcttttctaagtaatcaagcctgtttctgacctgctggggcgataatgtcattgtgctgttttcgcttaattcggatatgctccgtctgctggcgggttcgccttttgtatttaagtctttaattgattccaaaataaacaaaaactcttctttctccatcaatgtcagccgtttttcttttttcttagctgttttcgctttctggctgtttttgatatacagcgggacatcatcgggataaatcgtgttgccggatgctgccgcggccatatagtacgccgcattttgaagttctctgatgttgccgttaaaggtgtgccgctcaaacagcggataaacggacggatcgatatgaacatgctgccccgaggctgtcagcatatgctgcagaagaagcggtatatcgctttttcgttcagataaagcagggagcggaaggcataacacgtgaagcctgtaaaataaatcttggctgaacgtattttctgcgccggtatcaccaagatccgccgtgctgcttgcaatgatgcgggcggaaagcccggcatccagctcggaaagaaggcgggcctgtaccgagagcggcatgtctccgatttcatataagaataatgttccgcggcgggccctgtttaatgcgccttcagcgccgaacagttcatattcgagccgctcttcgctttggctgcagtgaacggtaataaatagttcgctgtttctgcgggatttatggtggatcgctctggccatttgtttttttccggttccgacttcacccgttatgaagactggcaaatcagataaagcaaattgcgaggccaatcgtttcgcttctgaaaaggtgtgatgttcgccggctagctgataaaaaggatcagtttgttcaattacactcatgaattggctccttttggttctaattggtttaagtataacacgtttgtgcgatcgaaaatatctttttctcttgtatcggttcatttaattttatttacaaaattaaaataattgtcttattatttgaatattcatgttataatggcatattaaatagggatttaaataagaaaggactctgtaaatgaaaccgttgcttaaagaagactctctcatccaggtaaaagacattttaaaagcgcaccaaaatgtaaaggacgttgtgatacatacgcctttgcagaggaatgacagactttctgagaggtatggctgcaacatctatttgaaaagggaagacctgcaggtggtcagatcatttaagctcagaggggcttataataaaatgaggcagctctcaaaagagcagactgaaaacggaattgtatgcgcaagtgcgggaaaccatgcgcagggggttgcgttttcatgcaaacacctcggcattcacggcaagatttttatgccgtcaaccacaccgagacagaaagtatcccaagtggaactgttcggaaaagaatttgtagaaatcatattgacgggtgacactttcgatgatgcgtataagagttctgcggaatgctgtgaaaaagaaaaccgcacgtttattcatccgtttgacgatcccgatgtcatggccggacagggaacggctgccatcgaaattttaaatgacattgacgttgaaccgcattttctttttgcaagcgtagggggaggaggactcctgtccgggctcggcacgtacatgaaaaacatatcgccggatacaaaaatcatagcggtagagccgaagggcgcagcctcctattttgaatcgaaaaaagccggacaagtggttgaacttgagaaaattgataaatttgtcgatggggcggccgtaaaaaaaatcggcgccgaaacctttcaaacgctcgaaaccgtcgtcgatgacgttgtgcttgtcccggaaggaaaagtgtgcagcacgattctcgaattatataatcaatgcgccatcgtagcggagccggcgggggcattgtccgtgtcagcccttgatctgtacaaggaagagattaaagggaaaaacgtcatctgcgtggtcagcggagggaataacgacatcggcagaatgcaggagatgaaggaacgctccatgatttatgaggggctgcagcattattttatcgttaatttcccgcaaagggcgggagcgcttcgcgaatacctagatgaagtgcttgggcctgatgatgacatcacccggtttgaatacacgaaaaaaaataacaaaagcagcggccccgcattggtcggcattgagctcaagcatcgggaagattacggcgcgctcattgcccggatgaatcaaaaaggatttcattacgtagaggtgaataaagatcaggatctgttccacctgttaatctgactttttttagaacggccgcgcaaaatgacagacacgctttctcagattgtatataataaaaagaaaacaatcgaaaaagaaggattgatatcttgttactcaaaagcctagagttcaaacgacaggacgggattcaggtaaaagtgacagaaataccggttgtcacggaaggtgaacattatttttttcaaattcatcagcaccttgagctttatttgagagaggtttttgcttcacaaagtgtgagaacagtgtattcattccgacaatatgtcaagcgccgtatgaagtggaaagattacgaggccgttttcaaccaagagattttaaaacataacgcataacggtgcatattccttagcgccttccttttgataagggagggtgcgggaatttttttatgatgaatgctgtaagcgttttatccatgggggggaatggaaatgaaaaaaatgaaaatcttcgctgccgtcttttgtttgctgctcttgtgcgcctgcggggggaaaacgataaaagacccgctgaactatcagattgaaccgttttcatatcaaaaccaagatggaaaaacagtgtcactgaaaagcctgaaggggcatgtctggattgccgactttatgtttacaaattgtaatacggtctgtccgccgatgacggcccacatgaccgaactgcaaaaaaaactgaaggctgagaatctggacgtgcggattgtgtcgttcagtgtagatcctgaaaaggatacgccgaaacagctgaaagcatttgctgccaaatacccgctctcacttcgcaactgggattttctaaccggttacagccaaaaggacattgaagattttgcgctgaacagctttaaagcaatcgtcaaaaagcctgagggagaggaccaggtcatacatcaaacctctttttatttagtcggacctgatggcaaggtgcttaaagattatgacggcgtgcagaaggttccgtatgatgacatcctctcagatgtcagagcggctgaggagctcaagtaaactggcagattagacattttcaaatctgaaaaaacatgttacactttccactagtagacggggaaggagcaaccagattgaagctgcgaatgttctcattgatcgccggactggctttgcttttatcagcatgttctgtccagcgcaccggttctgacactgaagaaccgaaaacgaaagatcatattgtcatagctgcggtcggtgattcattgactgaaggagtaggagatcctgacggttcaggatacgtcggcagggcagcggagtctcttaagaaaaagggacatgtgaaaacggttgatattaaaaattatgcggtgcagggtgacaaaacgtctgacctgctggaaaagcttgataataaaaaagttcagaaatcattaaagagcgccgactatatcttttttaccatcggcggtaatgacttaatgaaggtgctccgccagaatatgatgcagctgacggttcagccgttccaaaaggaagagaaaccttttgaaaaacgattcaaggcgatcgtttcaaaaatccgcaaatataatgaaaacgcagagctggtgtatgtcagcatgtataatccattcacgtttacgctgcctgaattaaaagaaattaatggggttgtaacggattggaacaagatcgccgcaaaagagctggaaaaagatcctcacgccgccgcggtgaatgttgaagacttgttcagtcaaaaaagcggcagcagacggatttcaaaggatgatgattttcatccgaacgcaaaagggtatgcacttatcgccgatcgattgtacggcatcattgaaaaacaagggttaccagcagaatagggtgaaatgatgaaaaagtggaaatcgctgttttttgttcttctcgcactcaatgtgattgccgccgcggtaattgtgacattattggttatgccgggagagcaggcgaaaatacaagatcagacaaaaagtgagtacggctttcatatcacgagctcgaaagaatctcttgccaggtttgtgaatgcgtacttaaaagagaaggcatcgaatcagcttgactacaaagtggacatcaataacgatgtgcacgtggcaggtaaaatcaaagcattctcaacctccattaacgcggtcgtcacatttgaaccgtccgtacaggagaacggagatgtgatgttgaaagtgacgaagttttccttaggcgaattaagcctgccgatcagctttgtgctgaattatatggacagcttttatgaacttccgtcatttgtgcacgttcattccggggataaaagcatcgagatccgtctgtcggaaatgcctttagacaacggcatgtatgtaaaagcggataaaatcaatctcgacacggatgaaattgaattttcctattatcatccgaaacaataagttttcataaaaaaaacacagatcctttcagggatttgtgttttttcgtgtcagcgttttttgtccagcttgctgaacagtttgattaacgttgcgagctcttcatcagagtagcagtcaaaccgtttaaaaaagtattctgtttttttctggttgaaatgatcgacaattttctccccggcttccgtaatatggattctgataattcgcctgtcctctttagaacggatgcgggtgatccattccttttctactaaagcgtcggtcactgcggtaatatggcttgcggagacctcaagaatgggggcgaattccgttacttttttaggcccttgttcactgagaatccgcaaaatggtgaattcgttcctggacagctctttatctagaatttcattaacttcatttctgatttgtttaaacacttttcgaagcaaagcttccatatcatacatcatttgtgtccttactttcaaatcatgaacctccaatatgtagtcagcgtggcattcgtttagcttcccctgaaagcagaattatttttattctgtttatacatgctataatataataataccacgtatgaacaaaggagggcacccgtatgtcagaaaaaaaagaaatcgccacatttgcaggcggttgtttttggtgcatggtgaagccgtttgacgaacagcccgggattgaaaaggtggtgtccggctatacaggaggtcatactgagaatccgacttacgaagaagtgtgcagtgaaacgaccggacacagagaagccgttcaaatcacatttcaacctgacatttatccgtatgaaaagcttgtcgagctgttttggcagcagatcgacccgactgatgcaggcggccagtttgcagaccgcggaagttcatatcgggcggcgatatattaccataatgatgaacaaaaacaaatcgctgaagcctcaaaaaaacagcttgaagaaagcggcatatttaaaaagccgatcgtgacagacatcttgaaggctgagcctttttatgaagcggaaggctatcatcagcacttttataagaaaaatcctgatcactacgggcgctaccgtgtaggttccggacgtcaaggctttctggatgagcattggagggacagataagatggcttttaataaagaagaaaaaatcaaatcattaaaccgcatgcaatatgaagtcacacaaaataacggaacggagccgccgtttcaaaatgaattctgggatcacaaagaagaggggctgtatgttgatatcgtatcgggaaagcccttgtttacttctctggataaattcgattctcattgcggctggcccagttttacaaaaccgattgaggaagaagaggttgacgaaaaactggacacaagccacgggatgatccggacggaagtgagaagcaaaacagctgattcccacttaggccacgtatttaatgacggtccggggccaagcggtctccgttattgcattaactctgcggcactccggtttattccgaaagacaagctgaaggaagagggctatgaagcctgtctgcatttatttgaaaaataaagctcagcaatgaggcctgcctatcagacaggccttttttctatgtttttttttcttcatgtaattgttcaataatctttacgattgtgtcttttgtgatgagcggcgcctgatcggattgatatctggggagattgaccttctgaaattccggatgtttggcgggatccggcaatatcgcgtaaagattgctccattcatataaagattccgtctcatgaggagaggtcagttcttcatgaagcttctcaccggggcgttttcccacttcaacagcggcggggcgcggcagtccgtgccggaacgcatattcttcaaacccgtgaagcagttcttcaagcctcagggactccattttaaaaataaacgtttctccgccctttgtgatcgccgcagattgcagggtgagcgttgcggcgtcatcaatcgacataaaaaacctcgtcatgtttttatccgtaatggtgagcggaccgcctgccatcaactgctcaaataaaataggaataacggaaccgcgtgaaccgagcacattgccgaagcggaccgaacaaaataccgtaccgcggttttgaacatgatgattcgcctgatgaaacagcttttcggacaacagcttcgtagctcccattgtgtttaccggggaaacggctttatcggtactgatattaatcacatgcgtcacctcttgcagcaaagcggcttcggcgacattttgtccgccgataaggttggtttgaatggcttcaaagggattatcctcacatgtcggaacctgcttcagcgcagctgtgtgaaagacaatatcaacacctttcatcacttggttgactcttctgtagtcacgaacatcgccgagcacaaacgacagtctttgttcatccgcgtatttttgtttcatcacatattgtttgctgtcatctttgctgaacacaatgacttctttaggggttaagagcaaaaggcgttttactatttggcttccgattgatcctgtcccgcctgtgacgagaacagttttatcgtgaaaaaacggttgtagctctactgcttgctgtttaggcatggcttatcctccaactctcgtttctctaccatgcatcatatgttgaacaatttcagcgagttaatgaaagaaaccaataaatcaaaaattagagaaaaacattaatctgatgcgcttttatatcgctttacctggttaatagaatagaaatcacaaataaaacattgtactaaatgttcattttaaatatttgctcatgtcaattctttctcttcataaattctcacatgcggacaatcttcacaaaaacttaacactgaacttcctgtatgtattttacaattaaagtacactttcataaaaggaggaaggaaaatgaatcattcaaaaacacttttgttaaccgcggcagccggattgatgctcacatgcggtgcggtttcttcccaggccaagcataagctgtctgatccttatcattttaccgtgaatgcggcggcggaaacggaaccggttgatacagcaggtgatgcagctgatgatcctgcgatttggctggaccccaagaatcctcagaacagcaaattgatcacaaccaataaaaaatcaggcttagtcgtgtacagcctagagggaaagatgcttcattcctatcctaccgggaagctgaacaatgttgatatccgctatgattttccgttgaacggaaaaaaagtcgatattgcggcggcatccaatcggtctgaaggaaagaataccattgagatttacgccattgacgggaaaaacggcacattacaaagcattacgaacccagaccgcccgattgcatcagcaattgatgaagtatacggtttcagcttgtaccacagtcaaaaaacaggaaaatattacgcgatggtgacagggaaagaaggcgaatttgaacaatacgaattaaatgcggataaaaatggatacatatccggcaaaaaggtaagggcgtttaaaatgaattctcagacagaagggatggcagcagatgacgaatacggcagtctttatttcgcagaagaagatgaggccatctggaagttcagcgctgagccggacggcggcagtaacggaacggtgatcgatcgtgccgacggcaggcatttaactcctgatattgaaggactgacgatttactacgctgctgacgggaaaggttatctgcttgcctcaagccagggtaacagcagctacgcgatttatgaaagacagggacagaacaaatatgttgcggactttcagataacagacgggcctgaaacagacggcacaagcgatacagacggaattgacgttctgggtttcgggctgggacctgaatatccgttcggcctttttgtcgcacaggacggagaaaatatagatcacggccaaaaggccaatcaaaattttaaaatggtgccctgggaaagaatcgctgataaaatcggctttcacccgcaggtcaataaacaggttgacccgagaaaactgactgacagaagcggaaaataaacatgaaaaaagcagcttatccaagctgctttttgatgtgaagagcgtttcatgagaaagtcttggaacggatagccgcaagcacagccggaagctggtcatacgtgtacgccggtactgtctctcggtaattaagcgccgcgatttgtttacgttcacccgggtttgtcatataaaaatggatcttatccgcaaaatccgcaagtccgctgtaagaaacaaaggatgaaaacgggggcgcgggagaaaggtctgtcagctgaaaggcctgacaagccgcaatgtctaagcttctcgtatttaaactgatatttccgatgccgcgtccgttctgattgagcgcaaaccgataagaacggtgagggtttaagaccacgtctgcgctgttgtaatataatgcggcacgttcgggtgcaatccattcatccattacgagcacattttgctgcctggcgatttttttaggcagatgtctgcgccatcccttcccgatgatacgaagcgtatacggaagcttcgccgctgctttcaccagttcaacgcggttcgggtacgggtatccgatcagaagcagatttgtgtgaagagaagcttcagcaggttgtttcttaaaaagccgctgattaacggggatcgggacataatatacgtgctgtaagcccatttgccggtaagcatcaagcgcgttttgttctatcgttaaaacggcatcggcaagcggggcgattgtcatgctcacatcgaaataaaaaggatcctccgtcatccatagataaacgggaatctgttctgtcttcagccattgaagccattcagacggaatacggtctcccgtcatcatcagactgatgtctggtttgaatgcccgtatactgcggatggtatcttcctcaaactcagaaacagaaaaaaagcggacggaagactgtaaaaagccttcctcaatccagcggtcaaaatacgtgtatatgcctttatatcctgaacggatatataaaacgttcatatgctgttacgaagtgaacgtgacactttcaactttgtcgacgtcaagcaatgttgtagcagagcctgccggtgtaacggaattttcctgcgtaacaaaaacgattccgtgaatttcgtcaaaggcaacaaattgaaccgggccgatcatgtctcctgaatccatcacaatgctgatgacagtgccgggctgaattcttgcaaaaatccatctcgcagctaatgaaataccgcttcccaatacagattgtgcgctgagactgtctttcgccgctgcttcatctacttttgcatcaattgccgattccaataattcttttactttgttttccacattatctcctccatctgtaccgccagataaagcgctgttgtcaaatacaggggctaaaagagttttcaataactcctttttaagctccaaacgatcctcgctcatgcggacatacacctcctttaacaatttcaacctcacgtttattcatattcctgattgaagagattggtataagtcgaatgccgttttgcttgtgtttttttcaatatttaatcaaacagctgaattttcgaatcaggctttgtttgcctatgcggtttgtaagagtatgacatacgttgtatagattaaaaaatgaaggagaggaatattttggattcggaagaaactgtaaaacacgggggttttgaggaggaatttcagctcgtactgcttcttcttcttttgttatcccgtcagccgtccggagatcattcagatttgcggcgtcagcttgtaatggcaaaagagcttggggttcctgtatcacgcgtcaatctgattaacggcagcacactgcaaaacgtaattgtcaaagaagtgctgtcagatttggccgtttttcaaaatccgctcaataatacgagatcaaacgtcgcgatttcaagcatcgtcagctggggtgctttttaataacggatatcaggctctgtctctttcggagccgttttttatgtttttacagaaggggtgatgggatggaaaagaagatctcaattatcttaacgagttacaacaaaccggatcttgtgaaacaggcgattgaaagtgttttgcatcagacctacagcaattgggagctgtttgtaatggatgatcattcaaatgaagaaacctcggctgccatcagtacgtatataaaagatcctcgcatatattatgacaacagttttatcaatcctgccgaacggctgaagtccacccggtatgccgttttgattaatgatgcgctttcacgggctaaaggcgaatacatcacttatttgacagacgacaccgtatttcatccggataggctcagccgcatggcggaagcgcttaatcaatacagcgagtttgatgccgtctattccagccagaaggtgatacatgtaaacgggcgcggaacagaacaattccacttctatcgttttgctgaagaggtgctagatcaggccgcttttctcgttgatcactgttcagtgatgcaccggagatcattgcttgagcgtgtgaaagagaagttcggcagcttttgggacgaagatgttatgcattggaatcacggagactctgttttttggagcaggctcaacacatttacatcatttctgccgataaaagaagtgttggatacgacctataaaacaccccactcatttcagaacacgtatcaatcgcttccgtctgtcctgatcgacggatcctttgtaaaggggacggatcagaaagtatatcagcttgaccgaaataaaaggaagcctgtaaacgagcgctggcattcgttatatgaaggcagaaccgtcgtcattccggatccgtttttatttcaatatgaggaagagaactccgtcagtattccgaattttcagctcgtcagggatcagtttcatgtttattttatagaagacggggagaaaaggctggttgatcatagcgcatttcgcttttaccgatttaaacagcatgacatcccggctttagagcgggccgaaatacaatcgcttccggacggtccgccgatcagccgggagacatcgggctgtattcaacatctgcccgggagaatgctgtttcgcattgaacgggaattttatgtttatttgagaggggttctccatccgatcagtcatgacgtagcgaaacgcttttttgcgaatcagaaggcgatacccatttcctttcagcaaattaaacaattaccaattggaatgccgttctatccggtgtacgatgaaattatgagaaatctcaatataacaaaaggttgagagatgcagttggatgtgtaaggaaaaggagagcttttatgaccgatcaatttgataaaaccgagaagcagtatatagagcttacttccggcattcagaggttcgagcatttcagtgtatatacggacccttttttgccgcagattttttcgcataactttgttcagctgcaccgtacatttccgttagacaaactgctgtcgtttttttcgtccgttccgggcatgcttcaagccaattatattcatgtgaaagcggctccggagcacgcgtttccgcttcttctgaaacaaaatctcgtaaagcagggctgcgtagtggaagatgagctgttttttgcaaggaaactggaaaatagggacctgcaggccggacacccgctcactgcttgggggacggaaaaaagcctcgccgacgggtcgtctattatgaacatctatgatgccctttacattggcgaggcggcggccgaacaaaagcttgagcggaaatatcctttgtataaggacggaacggttatgcttgtcgtgtgctacagcgacgcctcgcaaacgattccgatcggctgcggagagcttttcatcaacaaagcagataaaaccgcaaaaatagaagaagtcgcaattctggatcaattccaacgaaaaggctacggatcgatattgatgaatgagctgatggcggcggcaaagctgaacggcatggaaaccgtataccttgtgacgtccgggatggacggtgtaaaccgcttttatgaaaaactcggcttcaaaagatttcggcgcgtgcatacaatttttcattattttcttacatagttgggcattcgcataaaccaattgggagttggcccgcatacaatgccgtatatcgtaagaagaaaggatgatttgcgtatgtacggatacggatatggctacggttgcggcagttttggctatggttacgggcacggcggctgcggaggcggaaccagcacttttgtgctgatcgtggtattgtttattttattaatcatcgtcggtgcggcttttatttgttagactgaaaaaaatcctataatgaaaatcagcctgcagagaacatcactttctgcaggctttttgttatttccatgctgaaaaatcagcttgaaaaacattttaatacatactacctttctggagaagggggcgaaaatgtgaacataacgattgaagaattacctgaatcaagaattgcttatttccgaaacgtcggagagtatggcggaaagcaaaacaaagaactgatggagtcatttaaaaactgggcgcaattgaatggtctgcttgatcattctgtcattttaggaattccgcaagatcatccgaatcgtactcctaaagagaaatgccgctatgatgtttgtcttgttatcaatcaagaccatgtgcctgaaccagcccagatcggtacattttccggagggaagtacgctgttttcttgcttgatcatacaaaagaggcagtcagtggattttggaacactattttttctgagatcgaaaaaaataatttatcaatcagagagagcagcccattatcgaaaggtatactttacaaaaggtgaatcatcatttgtgtgaaatattgattcccatacagtaaagaagacgggaattttccgccctctgcttatactgattcagatcaaaaatgatgtgataatgagctgagcaaagaataaaatcaacaataggaatagaatttccagaacgcttttcaggctgtcgggacatctccggcagcctgttttacagaaaggtattttctgcaaaaaactttctgaaggataagaatgcggttattcatctgttcatacaatgaagcaaatgggttttcgaggtggaaagatatggggagctatttaatcaaaccggagcttgacgggaattatccgtcagtcagtcatggaaagggatcatatgtgtatgatcaggaggggaacaagtatcttgacggagcatcgggggcggtcacttgcaatatcggccacggcacggaggatattatacaagctttaaaagagcagcttgactctgtttcgtttgtgtatcgctcgcaattcaccagtactccggcagaagaactggctttatttctggcggatcatctgccgggcgggctgaattggtcattttttgtaaacagcggctcagaggcagtcgaaacagcgatgaaaatggccgttcaatattggcaggaaaaagggcaataccaaaaatccgtctttctatcaagatggggcagttaccacggcattactttgggagcgctttcattatcggggttctacgaacggagataccgcttcacccagttgctcgaacggtttcctgccgtttcagcgcctaatatgtatcgttcagagctgcagggagaggaatttgtgaaagctgcggcggctgaactggaaacggctgttcagcggatcggttcctcatttatcgcgggatttgtcgcagaaccgattgtcggagcagccggggcggccatcactccgccggcaggttattatgaagcgcttgaggatgtctgccgccggcacggtattttgtttatcgcggatgaagtcatgacggggctcgggagaacagggcggatgcttgcttctgagcattgggggatcgcacctgatatcgcggtgctcggaaaagggttaggcgccggttacgctccgatagcggcagccgttgcgtctgatgacatcattgaaacgatcaagcggggctccggggtcattatgagcggacatacgtacagtgccaacccatactgtgcaagagcggcgcttgaagtgcttcgctatgttaagaaacacgagctgcttcggcagtcagaggagaaaggcgtaatgctgaagcggaaattagaagaaatcaaagagcgcagcggggtgattggggatgtccgcggtaaaggcctcctgatcggggttgaattcgttaaggataaaacgacgaaggacgttttttcgaaaaaacaggccttcaccgaaaaaatcattaaagcggcaaaaaaacggggcctgcttatttaccctgcaaagcccggtattgacagcggagaaggagacgccgtcatcatcgccccgccgttcacgatttcatatgccgagctggatgagctgtcagatctattttcacaggccgcagaagaagttgaaaaaatgatgaagaaggattgagctgatatgtctatttttcataaaaaaatcgatattcatgaagcaattgccgatgtcaaggacgaatctgtcatcatgttcggcggttttgggggagtgggttcacctccgtcattaatcgaagcgattttggaaagcggcgttaaagagctgaccgtcatctgcaatgatgccggatttccggaaatcggcatcggcccgcttatcgttcataagcgggtaaaaaggctgatcgcttcccatatcggctcaaatcctgtcgcgggcagacaaatgactgacggagcgcttgaggtggaattttcgccgcaagggacgctcgctgaacggattcgcgcaggcggagcggggctaggcggtatattaactgatatcggcattgataacgcaaccgtttgtgaaaacaaagaaaccgtaacgattgacggaaagtcctatttagttgaaaaagcgctgacggctgatttcgcttttgtgtccgcacatactgctgatgaattcgggaatctgacgtttgacaaaacggcgcgcaacatgaaccctctgatggctgcggcggccgaaagaacatttgctgaggcggcagagattgtgcctgccggcgaacttgacagcgagcatattgtaacgccgggcgttttcgtggagggtgtcgtgcaaagtgaaggagtgaagtggaaatgggcttgggaatagcggaaagagagagtatcgcgaggcgggccgccagtgaagttacctcaggtatgattgtcaacctggggatcggcattccttctttagtgccgaactttctgcccgccggcatggaggtaatgctgcaggcggaaaacggcgtcctcgggatcggcggcagtccggagcgcggagaggaggatgagcttttatgcaatgcggccgggtttcctgtcagtacagttaagggtgcttcctattttgattcagctctgtcttttgccatgatcagaaaagggctgatagatattaccattttaggcgcgctccaagtcagcaggacaggtgatctcgccaattggctcgtgccgggaaaaaaagtgcccggaatgggcggggcgatggagcttgcccaaggcgcgaaaaaagtagttgtcgtcatgagccacaccgatcagaaaggacggccgaagctggtcgaaagctgttcattgccgcttacagcagcgggctgtgcagatctcatcattacagagaaagccgtcatcagcatagatgatggggcttttgttcttgaggaactgctgaatggcacgaccatagacgatgtcattcaaacaacggatgccgagatcagattgggagaatgttttcttaaaagggggcctgtccatggatcaattagaaaagaaagtcactgagtgggcggaagaaaacacagcaaaagcggtaagcttgctgaaacggctgatcggggaaaaaagcacgttcggccatgaatttaacgcgcaggcagtcgttttagaaaaactgagacagtttgacatggatattgatgtatgggagccgagtgtcaaacatttgaaagagcatccttatttcgtatcggaacgcgaagacttccatgaaagcccgaatatcacagctgtaaagaaaggggccgggggcggaagatcactgatactgaacggacatattgatgttgtcccagaaggaaatcccgccgcatggacgtatgaaccgtttaccgctgttgaaaaggacggcaaagtttacggccgcgggtcaacggatatgaaaggcggcaatacagctctcttgtttgcgttagaagcgcttgaagcctgcgggattacattaaaaggagatgttctgtttcaaagtgtcatagatgaagagtgcggcggcgcgggaacactggcggctgttatgaggggctacaaggctgacggggcgcttattcccgaaccgactaatttaaagctgtttgttaagcagcaagggtctatgtggttccgcattacggtaaggggattgtccgcacacggcggcacccgctatgaaggggtgagcgccattgaaaaaagcctgcatgtcatcacagcccttaaagagcttgaacacgtccgcaacgcccgtatcacagacccgctttatcgggacgttccgatcccggttcccattaatatcggcaccgtccaagggggaacgtggccatcatcggtagctgaccgtgtggtgatagaaggcaggtgcggaatagctccggatgaaacgcccgaagcagtaaaagaagagctcgcaagctggctgaaagatttggagtaccgggatgagtggtttaaacaccacccggcggaaatagaatggtttggggctcagtggcttccgaatgatctcccggatgagcatccgctgatttccgctctggaatcttcttttgagaaaatgaaaggggcaaaaccggttcgtgaagcgtccccgtggggaacggacggagggcttttgcagcacgcgggacagacgccggtcatcgtcttcgggccgggagaagtcaaagcggcgcatcaggcgaatgaatacattgaaatccgggcgttaatcgatgccgtcaaaatcatttctctttttatcatggaatggtgcggggtggcagatgggggtgacggagctgataaaggaactgagggctgaaaagggagcggccgagattgatgcagaccgtttcaatgagcggctcagagtcattcgttatgacggacagatcacggcgcttattccggccgttttggcagaagcaaagcaagaaggagcccaaaaggtaattttctttgccaagcgcggcgatgagccggaatttgtcaagcatctttttattgttgagggtgtcatagacgggtattacaacgggcatgaggctgttgtgatggtgcgctatttagcagaggaacggagacggtcagattcatatgtatcagaagattcgactgttgaccgtttatatgagacaccgcggcggggactgactcaggcagaaagcgcgctgatgttcagaaaagcggacgaagatgatgcagaccttttaacgcacttatataaacatgtttttcttacctatccgactcctgtctttaatcccctttatattaaaaaaacaatgagagaaaacaccatctattatgccgcattcgatcaggatcgtctcattggggcggcaagcgcagatatcaatccggtattggggcacgctgaaatgaccgattgcgcggttctgtcagattacagggggaactccgtaacggcacacttgtttaaagcgttggagcaggaactcgcgggccggggaatcatccatcttttttccttggcccgtgcagcgtcttacgggatgaatgccgttttgtaccatgcgggatacggctacagaggcaggcttgtgaacaactgccgcatttcagaagggctcgaaaatatgaatatatggtgcaagactttacgtttggccattcataaggaggaattcgtttgacaaacaaatggtttcagccgaagcgtcattggaaggagattgaattgtggaaagatgtgccggaagacaagtggaatgattgggtgtggcagctcacccatactgtaagaaccgtcgatgacctgaaaaaagtcattcatttgaccgaagaggaagaagaaggcgtcaggatgtctgtaaaaaccattcccctgaacattacgccttattatgcttctttaatggatcccgataacccgagatgtccgatccgcatgcagtccgtgccgctgtcagaagaaatgcacaaaacgaaatatgaccttgaagatccgctgtttgaagatgaagattcaccggttcccggtcttacgcaccgctatcccgaccgcgttctttttctggtgacaaatcaatgctcgatgtattgccgatattgcaccagaaggcgtttttccggacagatcggaatgggggtgccgaaaaaacagctcgatgcggcaatcgcttacatccgggaaacgccggaaatccgtgactgcctgatttccggcggagacgggcttttaatcaacgatcagattctggaatatattttgaaaaacctgcgtgacattccccatcttgaaattatccggatcggaacgagagcgcccgttgtatttccgcagcggataacggataacctttgtgagattttgaaaaaatatcatccggtctggctgaacactcattttaatacgagcatcgaactgacggaagaatcggttgcggcgtgtgaaaagctcgttaacgcaggtgttccggtcggtaaccaggccgttattttagcaggcattaacgattcggtgccgattatgaaaaaactcatgcatgatttagtgaaaatccgcgtgcgtccgtattatatttatcaatgtgatttgtcagagggaatcggccatttcagagcgcctgtgtcaaaagggctggaaatcattgaaggactgaggggccacacaacgggctttgccgtgccgacctttgtcgtcgacgccccgggcggaggcggtaaaatcgccctgcagccgaactacttgctctcccaaagtccggagaaagttgtgatcagaaacttcgaaggggtgattacatcttatcccgagccggaaaactatatcccgaatcaagccgacgactattttgaatctgtttttcctggaacgatggccaaacgcgagccggtcggactgagcgccattttcgcggacaaagaggtttcgttcacaccagaaaatgtatcgaggatcgacaggaggaaaacgttcacatcaaaccctgatcatgaaacgctgaaagaccgcagggaaaagagagatgaattgaaagaaaagaaatttattgcacagcaaaagaaagagcaaaaagcaggatcggaagtcggaggtgaatcgccgtgaagccatgcgagtggtgcggcaatcagaaggcgtcagcttgtcaggcggctgtgtactgggagcttcctgacggtacgagggccatagaaattacagaaacacccgcattcgcctgttcctcctgcggcatgacttatcaggaggaagcggtcatagcagaaatcgaaaatcagctttttttagtcaatgcaaaaaaattaccggaaacactcacatatcaagagctgatggagacagaacggatcttgaaacggaattattttgacttctcctagtcttcttttgttgtaatttcacacttgaattgtataatagtacaacaaaagacagtcatcaggaggggaaacccatgaaatccttttatcactatttgatgaaatacaggcatcccaagccgcaggacgcaatcagccagtttgcgaatcaggcatacgaagatcacggctttccgaaaacgtcaagcgattatcacgagctcagttcttatttagaactgagcgccgactatttagaaacgatggcgacatttgatgaagcttgggaaaaatatgagaccgaggtgcatcacgcctgacgaaaaaccgcacattgtgcggtttttttctgttgaaatcactcgcttatgaggtgccgtatgatcaaatcccgcaacgccgtccgttttgatcagctcgtaaacaaatcttcctgaaggcacgtatcataaggcagtagaatgtatagctgcagagttcaccggatcagcctgctgccggcggggtcccgggtaaggagtctcttttcacggagaaataatcaaacatttaaatgaagtgagaggaatcaaatgattcattaggtaagactgatgaggcactgacgtttggacggaaaaggggattttatgtgacaaggttgaagcggattgaagttgtgccttcattgaaagccgaaacgagtttggttgttcatgataatcaagcgattgcaaatatgcagccggaattgaatctccatacaccttcgatgatgtgtttcacagcaaatcttgaacatcatggcggtgatattgtcaacatgccttcgggccgggtatttacctttggaaaaaaacaaaaaatcataaaaaatagaagctttttgtctcagcattgttactgctcagtcgatcgagagcggaatggcatcagacgcttctgttacggtaagtgaaaaaacgcacaagcatgttgcggtttttgacattttgaacaggtgcagaaatagatatttcctgtggttttcatgcccatgcgaaatgatggcggccggcatacgatagcgtatgacagtccgcggcaagggggagacagcatgaagccagataaaccgaaatttcaagtgggagacatcgtggtcgtcgtgatgtacggaaccgtcggcaccattacgaaggttcatcaaattgataaacattacctttacgaagtcaatcataatgaagtgctttattttgaatcgtccatccagctttataaagattatgagggcgtgatcgtcgatatggaaaaattggatattgaatatgaatttctgatcggcgacgtagtatatgtaaaggactacggaaaggaattattccgtgtcatcggccacagaactgaaatatggagatatttagaggatggctgggaggatattatttatgagctgactcggctgaaagacggagagtggcttgaaacggaggaagaggatctcacgctggttctgagaaaatatgaaatggatcagtttgtgcatcagctgctgtttgtccactatgttggggaagcatctcatgagatcggcgaggataccgtcgcgtctgctcttcttcagtttgaaggcgatgctgatgatcccgataccctgcatgtgctggcggtatcgattgtagatgagctgcttgatatttataacgattataagattctttatcatttgttcggtgacgaagaatataaagatatgatgaattttgtgctggaaagcctgcgggagcatttcagctagccggcaaaaaaacggacggtgacatataaaaaccagggcagacagccggcaaagattacaaacgacattcctttcagcactttttccaatacgacatcaaatccatctccgtccaataaagccatcattttcgtcatcatcttttctccctccggggcttgttttttaaaagtatatgagcggacaaaacgtttagaactttcgggtataatttgaacggttttttcataaaacataaaaaaggaggcggtgtttgcatgaaagaaatagatcttgtgattgacacagaagaaatagctgattatttttacagtcagcttgctatgcgcgggtacataccgagtgaagaggaaatcttcgaaatagccgacatcacctttgattatttattagaaaaatgtatgatagacgaagagcttgatgaagactgaaactgcggaaccgaagtgaaaaagcttcggttttttcaatcagctcgggagaatgaaacatggggggaaaacgttgtacaagccagcaagtcttttcgcattgtttattctgctcgcagcagcgatccggatagaagccgtccgggtttttgatgagcgtgtcatagaagcggctgtcaggatcagggctgcctggctgaatgaattgatgttatggataacggagctcggcacgaccgcggtgcttttgccgcttcttcttttgacaggcgcggctctgtatatgtacaaaaaaacgccggatgttgtttttttgccgcttctctttctcattgaacggattgtaaacataaaaataaaagaattgattgaaagagccagacccgcttttgaaccgctcgtccatgaaacctcatacagttttccgagcggccactccatgaattcggcagtgatgtatcctgtcatcgcttactttttgatcaagcatgttctgtttttcacgaaaagaaaacgggccgtcaccgtctttaccggggttctcgtcattctgatcggattcagcagaatttatttgggcgcgcattttccgacggatgtgcttgccggattcagtctcggactttgcctcgtttcgctttttgcgctctttgacgaaaagtatcatccgtttcgacaaaaatagagacaggaaaaatgagaaaaaacgctaatactattaagaaataagagggagggatcttgatgctgttatcgctgcccgtgtttaaaaaaaagacttgcgcctatgatgtgacgatttttcaaacaccccgctacggcgagaaaaagggatacagggtcgtctatcggacagagctggccgctgacaatcatcaagacgcactggaaagggcattttctgtttttaatgtgcctgatacggtcccaaacgactatcaagccagattcatagcgaccggagatgtcatactcatagacgaaggaagaaaaggaaagacgtattacaggcttaaccctgcgggatggagcaaaattaaccggctgctcgtccagccgaggtaagatggggccggctgaatcttcagccggcttccgtattgtctgggaaagacagtgttaaggcttccgtttagcggcggaatgctcttttccatgcgcttcatcagctgcaatgacgtctgaaacgggcacgtgattgttctttttctggccggtcacccggttgcgctgttttttgcccattatgttcactcctttttctttaggcttgtcatcccgcatattctgcccaagatcgccctgatcatgctgatgattgtctcttaccgttattcagtgtacaatgggtgggagtttgaataggcaggaggaaaaggaaatgagtgtacatataaacgctgaaaaaggccaaattgcggatacagtgcttttgccgggagatccgctccgagcgaaatttattgcggaaacttatcttgaaaatgtggaatgctataatgaagtcagaggaatgtacggatttacgggtacatataacggcaaaaaagtatcagtccaaggcaccggcatgggtgttccgtctatctctatttatgtgaatgaactgattcagagctatgatgttcaaaacttaatcagagtcggctcatgcggagccatccgtaatgacgtgaaggtgcgtgacgtgattttggctatgacgtcttcaacggattcacagatgaaccgtgtcgccttcggcagtgtagattatgctccttgcgcagacttcgaactgcttcataaagcgtaccaggaagcgcaaaaaaacaatcttcccgtagcggtcggaagcgtattcaccgccgatcagttttacaatgaagactcccaaatcgaaaagcttgccagatacggcgttctcggcgtagagatggaaacgactgctttatatacgcttgccgctaaatacggcaaaaaagcgctgtctatcctgactgtaagcgatcacgtattaacgggagaagaaacaacggcagaagagcgtcaaacgacttttcatgatatgattaaactggcgctgcatactgtatcgtaaacttgagatgagggttatgctgattaaagcagccctcttctttatgcatcgccctgattcaaaaaaagaaaggtaagtgtaaaatgaagaaatccactaaatggttctcgctcgctgccgctctcagcgtaaccgcaatcgtgggaaccggctgcagcatttcaggcggcgacagccacaaggacacaaaaacagcagctgaaacaaaacaatcagatgacacatcaagcaaaaaaacaacgaaggcagaaaacagcgattttgtattggagagcaaatattttaatgatattaaagaagtgaacgggcttgagaccattcaaaacccgacaaatacacttgcgctcgtgaataagacatacacgctgccgggagattataaaccgaatgatctcgtgatcccgaaagttgaattttcttttactgagaaaatcgagaaacgatatatccgcaaacctgccgccgatgctttggcggaactattcagcgccgggaaaaaagaaggttatgacctggttgccgtttcaggataccgctcttatgacagacagaaagttattttcgataatgaagtcagtctgaaaggtgaaaaaaaggcgaaagaagccgtcgcatatccagggcaaagcgaacaccagacggggcttgccatggacatttccagcaaaagcaacggatatgagctgaatgaagcgttcggaaacacggcggacggcaaatgggtgaaagaccatgtgtatgaatacggctttatcatccgctatcctaaaggcaaagaaaatgtcacaaagtatgagtatgaaccatggcatttacgctatgtaggcaaaaaagcggcaaaagccatccatgaccatcaattaacgcttgaagaatattttaatgaagtaaagaaagtgtaataagaagaagcccgcttgaaaaatagaaagcgggctttctttattaccagaagagtaaacctccaagcgcaaatccggtaatgaaaccaaggccgataccgtaggctgctccccagcctccccagccaccccaatagccgaacccgtatcctctgtgacggccgccgacaggggcgatatacactttgctgttagtcacccgtacgattcttccgacgtggactctgccgtttcgttctgtaattcttgctacttttccctggtgctgccggcaaagatgataatagttttgcatcttttctcctcctatccaacctatctttctatgtcagcttatgatagagtgcggtaaaaaggttggacgaaaacaggaggacaatcgctgttttacttgtaagcgacaaaagcgcagtgtcccatatattcacggtacgtctgcataagcttgtaatgagccgtcagcgtatcgtagtgaaccggctgaataacgggcgataaatccatttctgtagtcggctcctgcgcattgttttcatagacagcgggaatgaaatccgcgttctgaaagccttgctgaagcaatctctgtttccatgccgtttcatcctgcaatacggtaaaaccgtagaagtcttttatctgcgtgatggcgttttccggcatgggcttttgtaaagcagcttcaatgccgatcagcatacccccgggtttaaggacccgcaggatttcagacagcgatgaatcaagatttgaaaaggtgagaactgattcggaaagaacggcggaaaattgattttcagcaaacggaagccgctcaagctccgccaaatagcccggaatggttaagccttcagcggcaaatcgttttgctgctttttcaagcataaggggatccttatcaacacaggtgacggggtacagcaggtggccgagataagcggccgtctgtcccgttccgcagccggcgtcaagaatcggttcgccaggaggaggagccgcttttgtgagaacggctttggaaaaagcgagcccgccggggtgagcccctccgactccgaataaggacagcatttctaaatatttgctcaaaggccgaatcctccttttttcctcagcatatgttgagagaaaagcataggtttgggtaaaggggaaagaagggcgcctcacgtttgaagttgacgaatgagcgttcgtctatgataataatgtaagaataaaaaggtggtgttttcttgaagcggcaatttaaactgttttttattatattgatcactgcggtcgcagcctcggcgcttacgctgtttatcacgggcaatacgaccattttcggacaaggctcggctgctttgacgaacagcaaatttgagaaattcaataaagcctacgagcagattaaaagtgattactatcaaaaaacagatgacagcaaattagtagacggagcgataaaaggcatgatcagttccctggatgatccatattcttcttatatggacccgcaggaaggaaagtcttttgaagaaaccatttccgcttcgtttgaaggcatcggcgcacaagtggaagaaaaggacggcagtatcctgatcgtatcgccgattaaagggtcacccgcggaaaaagcgggggttaaaccgaatgaccagatcttgaaggtcaacggcaaaagcgttaaaggccttaatgtaaacgaagccgtcgcattaatccgcggcaaaaagggaacaaacgtcaagcttgtgctgcacagagcgggtgtcggcgatctgaacctgtcgatcaaacgtgacaccatcccggttgaaacggtgtactctgaaatgaaaaaaggagacatcggcgaaatccaaatcacatccttctccgaatcgacggcaaaagagctgaattcagccattgacagcctcgaaaaacaaggagcgaaaggatacattctcgatttaaggggcaacccgggcggactgatggatgaagccatcaaaatgagcaacatgtttatcgataaagggaaaaatatcatgcaggtcgaatacaaagacggcacgaaagaggtcatgaaagcgacgaaagagcgcaaagtgacaaaaccgacagtcgtcctcgtcaatgacggcaccgcgagcgccgcggaaatcatgtcggctgcgctgcatgaatcatcgggcattccgctgatcggcgagaaaacgttcggaaaaggaaccgtgcagacggcaaaagattacagcgacggttctaccgttaaactgacaatcgctaaatggctgacagcggacggagagtggattcataaaaaaggcatcaaaccgcaatatcaggttaagcttcctgaatatgcgagcctgccgtatttagatgcgaaaaaaacatacaaatacggagattccggaaccaccgtcaccaatgcgcaaaaaatgctgaaagcgctggggtacagcgtgaaagtaaacggcacgtatgataaagcatttgaacaagcagttaaacaattccaagcaaaagagaaactgaaacaaacaggcattataacgggagacacaacggcaaaattgatgacggatctgcaaaaacagcttgcggacaacgatacacaaatgaaaaaagccgttgaaacattaaataagaatatgaaatagtaaaaaacacccgatgcgccgctcgcgcattgggtgttttctgtttgcgaaaagcccgtcttatgtcgtttcctgttcaaaaaggtggctgttcgcctgaatgaaaaactgtgattgctcatagtgataggtgacttttgagaagtcaaacggctggccgttggttaaatgaaaaatcgtttcaacgcatagcttaggcgctcctgtaaatagacctaagtactccgcttcttcctcatttaacatccccgcgtacagatataaatctgaaaaaccgcgctttaacccgagaccttctcgaatataatcaaatattgattctgccacgatctctttattcaaatacgtaataatcgatttgttgtaaaatgactcttcgatacacaatgtcagcccgtcaatatatcggattcgcttgacataatacacgtcgccgtcaggcggcatattcagattttgggcagcctcaggcgtgggttttctcacttccagcgctaataatttggaagtgacattaaaatcttcaagtgattctttaaatccctgattagaaagcagactgatatacccttttcttttattccgtctgacaaaaatgccgcttcccctcacttgaaacacaatcccctttttttctaataaatctaaggacttggtgatcgtgcttttgctcacgttaaaccggctcattaaggtttgcagcacaggcagtttatccccttgctgcagctgatgttcttctatgtatttttcaatatctatcgcgatttgctggtattttaacatatacattcctcattcatttattgtcccgcttctttcagaattatagcataatcgtttttaaaagccatttcgtaaattaactataattgtttatgtattgataaattataccggtacaattataatgtaaacgtataatatgaaaataaaggcaggcattcttctgcacttgcgaagcggatgcttgaagcggctgcagtgcatttattcggcatgcaagcggcagtcaaataaaggaggatataaacgatggggacattgccaaaagattttttatggggaggcgctctggccgcccaccaatttgaagggggatggaataaaggcggcaaggggccgagtgtagtggacgtcatgacggcaggcgcgcatggtgtgccccggaaaataacagatacaattgaagagcgggaattttatccgaatcatgaagcgatcgatttttatcatcgttataaagaggacatcgcattattcagcgagctgggtctgaaatgtttaagaacgtccatcggctggagcagaatttttcctaaaggtgatgaagccgagcccaatgaggaaggattggctttttacgaccgggtgtttgatgaattgctgaaacatgggattgaaccggtaatcacgttgtcacattttgagatgccgctgcatttggcgagagaatacggcggtttcagaaacagaaaaacagtcggattttttgtaaaattcgctgaagtgtgttttgaacgctataaacataaggtgaagtattggatgacgtttaacgaaatcaataataagatggatgtgaataatccgatctttttatggacgaactcaggcgtcgccgtcaaagaaaacgaaaacgcaaaagaagtcatgtatcaggccggccatcacgaactgctggcaagcgcattggctgtttcgaagggaagagaaatcaatcctgagttcaggatcggcgcgatggtatcacatgttccgatttacccgtactcatctcaccccgacgatgtgatgctggctgaagaaacgatgagacagcgttttttcttcccggacgtgcaggttcgcggatattatccaagctatgcgttaaaagagtttgaaagagaaggctatcagatacactttgaagacggtgatgaagagattttgaaaaacggccgagtggactacctcggattcagctattacatgtctacaaccgtaaaaagtgatgtatcaaacgataataccggagatgtcgtaaacggaggattgccaaacggcgtggaaaatccttatattacagcgagtgattggggctgggcgattgacccgaccggtttacggtacacattaaaccgcttatacgaccgctaccagattccattatttatcgtggaaaacggattcggcgccatcgacacattagaagaggacggttcaattcatgacactccaagaattgaatatttatcgtcacatataaaagctttgaaaagagcaatcacatatgatggtgtggatgtaatgggctatacaccatggggaattattgatatcgtgtcatttacaaccggagaaatgaaaaaacgctacggcatgatttatgttgatcgggataatgaaggcaacggttcaatgaggcggcttaagaaagactcatttgaatggtataaaaaagtgattgaaacaaacggctcatatgtatcttaaaggtgtaaaaagggaaggcttcaccgttgtgtgaagccggctttttatcagtaattttgaaagcgcattcattcaagcgggaaggaggtgactgtccggctattcaattagaatcgcttataaaaataaggaaagggatggtggttcatgttttttaaaaaaggtctgcacataacgctggtttttcttatgtttttctttttcatatcaagcagcatggaaaccgaagtgtatgcagctgatcggaaggcttcagacaaaaacaaagtaagggtgtggttcagttctgaaaaagatccggcttcccgtacgtggtatgacgggccgctagaagtgaaatacgccttagacgaacaaacaccgcttacattgacaaaaaagaaggcttctgactccgccgctgtgtatattgatccgtcgcgccgctatcaaagtgtgttaggcgtaggatcgtccctggaagaatccacaatccataatttatcaaaaatgacacccgcaaaaagaaaagaagtgctgaaaaaactcgttgatcccaaagatggtatcggaatggacgttatgcgcataacgatcgggacatctgattttacagcacaggaattttatacgtatgacgatatgcctgaaggccaaacagatcctaagctccgtcatttctcgatccaaaaggatattgatttacacattacagcaaccatcaaggaagcgctggcgataaatccggaactaaaaatcattgcctcaccgtggagcccgccggcttggatgaaaacgaatgaaaacctcaagcggggaaagctgaaagataaatatatcggcacactggccgtttacttccgcaaatttattgaggcgtacgaaaagcaaggaattccgatttatgcgctgacccttcaaaatgaacctttgctggaaatcgactatccgagcatgtatatgccgccgtctcagcagcgtaaactggcactggccttaaaaaaagaaatgaaacaacacgtaattgacacgaaaatttggatttatgatcacaatgcgagcggggcgtggaactatattccgccgattttagatgataaaaaaggaaaccgggcggcagacggcatcgcttttcacgattatgacggtgacctttccgtcatgtcggaaatcggaaagagatatcctgataaatctattcacttaacggagcggtctgtctgggggacggcaggggcggaccggatcgcgcagtatttccgcaatggcgcgtcgagctacaatgcgtgggtgacgatgctcgacagtcaaatcaagacgcatcattggataggcaccccagacccgacgctgtttattcaggatgctaaaaaccctgaccgctattggaatatcccgatctttcatatgacaggcaacttttcaaaatttatcgaccggggagcaaagcggatagaaagtaattacggctccaaaaacacagtctcgaatgtatcgttccttaatcctgatcaatccattgtgacagtcgtaatcaaccagacatcttcagaacaaaaattccatgtcgtttcagaaaatcggcagtttgaagccgtcatcccggctaaaaccgtggctacctacaaatggaagcgaaaaaagtaaaaaaccggcacatttacgtgccggcttctttctgttaagcgcctttttggttcagttgatcagaaggcgctttattgaataaaccgtctttgacggcgtttgaaggcgctttttttacaaaaaacgggttaaggataataacggctgccatgttagcggtcaaaccccaaaacccttcatatataccgtgggcggattgggtgatatttaccgtgaatgtcacgataagaccgacgagaagaccgataattgtcgcttctttcgtttgattcttccaaaacagactgacggcgatagccggaaagatctgaaccatgccggaaacaccgagaagctgaagggtaacgagcgcagtcgggaacagcataccgaataaaagcgcgagcccgatgacgacaaataccattgaacgggtgatcatcgtcagtttgcttggtgacacattcgggtgaatcaaatcccgatataagttattcgcaaataagtttgatgctccgattgccatgatagagcagggaatcaatgacgcaagagcaatcgtggagtaagcaaagccctgcgcgactccgccgtaagacgtttgaatcagcttcaataaagcgagccgcggattggtatcttccggcaggacaagaaacgcgataaagccgagaaaaataacaagaatcaaaacaatattataaagcggcagaaacatgctgtttttgcggacggcatctgcgctttttgccgtaaatacgccggttgccgcatgcgcccacataaagagcgccagcgcagatacgatggaagctgtgataaaccaaggaattcctttcggccccgagtccggaatcgtcagcatttgcggcgctttttcagccaaagtgtgaatcatcggcgtccagccgtgaaaatggatcagcgggagtgacacgaccataaacagcataatcacccacacgagaatgtctttaataatcgccgtaaacgtcggccctttaattccgctgaaaaaagtatacagcgctacaagaataaaagagatgatgacgaccatattgacattaatgacacccgttccggccacctgaagcgtatcttgaattccgctcagctggagacaaatataaggaatgagcataagtacgccgacaatggcgacaagactggccaaaagtttactgtcaaaacgctcacgggcataatcggcaagcgtcgttaatttgtgtatttttgccactttccacagcttcggcagaaagaaatacgcgataaaatacgccaaaacagaatacgggattgcaaaaaaagcaacgcttccccctgtgtaggctgtgcttgttaagcctaaaaacgtataagccgtatagagatccgcgccgactaaaaaccagacgaggagccccccgaaccgtctgccgccgacagaccattcctcaacagaagtgcgtgatgatttgtctctcccggctataaagccgatacagacaacggttaaaacgatgacggctgtaatgatcaatgctgttatattcgcgggcatcagtccagtcctccttgtttcttctgcagcctataaataagaaacgaacataatggagtgactgcgatccataaaagcagccagaaatgaaaaaaaggcagcccgataatgatcggatgaacccgattagcgactgacagcagggccagctggctgaaagggattaagatgagaacgaaaattagtgcttttctgaccatttactttcctcctgaaacttgataatgctccttatcatagcaggtgtcagataagatcacaagatatttttcagaaaaaaaagaattctattacttttttaactgaaacactttagttgcatcttcattcatattaaattagaatagttaatatctcgaaatcaagatatttaggagtgaatacattgaatacacaaggattgcaccatgttaccgcatttgcaaaagatcctgctgaaaatcttcggttttatactgaagtgctgggtttgcggctcgttaaaaaaaccgttaattttgacgacccggccacttatcacttttatttcggcaaccaaaaaggagagccgggcacgatcattacattttttccttttcagggaagccgcccgggaaccgtgggaaaagggcaggccggaagaatttatttctccgtgccgagaggagcactcgcgttttggaagcgccggcttgaaggaaacggcttgtctgtaaaagaacagatcatgctgtctgaacaagtccttctctttaatgatacagaagacctgccgcttgccataatggaagatgaaagaagcggacagagtgaatggactcctgcgggcattactgaaaaagaagcgatcacaggcatgagaggtgttcttctgtactcgtaccgtcctgaagcaaccattcaatttctcatagaacgcttcggttattcaaagacaggagaagaacagcagattgtcaggctgcaatcggaggcgtggatcggacatattatagatgttgatctcgcgccgaaagaagcaggtatcggcggttacgggacggttcatcatgtcgctttccgcactagcgaaaaagagcaggcggaatggaaggatattcttgctgattctcatcttgcttcatctgacattcttgacaggtcttactttacttcaatctatttcagggaaagcggcggcattttatttgaaatggcaaccgatgaaccgggctttatgacggatgaaacctttgaaaatctcggaacagagctgaagcttccggaatggctggaagagcatcgcagccagattacagctgttctgcccaaaatggaaaaaggagaatgatgatgaaacatgtgtttgaacagggaatgtcagaaaatgttctgctgcttttgcacggaacgggaggaaatgaacatgatcttctgtcgctcggacgttttatcgatccgaacgcaagtctgctcggggtcagaggatcagtgtcggaaaacggcatgccccgtttttttaagcggctgaaagaaggcgtatttgacgtgaaagatttaattgaacggacggaagaattaaagaattttattgatgaagcggcgcaaatgtacggattcagcagagaaaacgtgattgctgccggctattcaaacggcgccaatattgcagcaagtcttttgtttcattataaagatgtactgaaaggagctgttctgcatcatccgatggtgccgatacgcggagtgaagctgcctgatatggaagggatgcctgtgtttatcggtgcaggaaaacgcgatcctctatgtacaaaagaagaatcggaggagctttatcattatctgacagatgcccatgcatccgtttctcttgtttggcaggagggcggtcatcagctcacacagcaggaagcagagcaggcacgaacctggtacagtgagcgattcctataagaaacccttagtccgcttaagcggactaagggtttctttcatcttacagccaagttgacactttagatacaggcagccggttgcttttatgcgccggcttaacggctttaccgattgaaatcagcatgacgggcacgaaacgctcgctcacgtcgaattccttaacgaattgctctttattgaatccgccgatcgcgcaagtgtcgtagccttttgctttagcggcaagcatcagttgcatcgctgctaaagaagcgtttaaaaatgctgaatcacgggcaaactgatcattttggtatgcaccgttaatctggcctaaaagcgtttgtttaatctcttctgtgatattgccttgctcagccagttcagcataaacgtcttcaccattttcatttgcttttaaatcgcctaatacggcaataactgctgatgaatcaataatctgtttttgattaaaagcaaccggaagcagggcagcttttgcttcatcactgtgaaagacttgaaaatgccaatgctgaaggttccaggcggaaggcgcttgcgttgtgatttcaaggagttctgttaattcctcttttgtaatgaccgcgtctttatcgtattctttaacagatgcgcgttcctttaaaacgtctaatacggatgtcatcatgtttcctccttcggataaacgtgttatcataatagaaaagttagaagcttactaaatgtaactcgaaaactaattttaatggatcacaaaaaacttgtcaattcatagatgaagggatgaactcacgtgggatatacaatgtgtcctaaaatggaatccgctttttcccttttgggaaagcgctggaacggcctcattatccatgtactgatggacgggccgaaacgatttaaagatatgaccgaaacgataccgacaatcagccaaaaaatgctcgcggagcggctcaaagagctggaacaaaatgaaatcgtcgagcgtcaggtgctgcctgaaacacctgtcaaagtcatttataaactgactgataaaggcttggccctgcaagccgtttttcaggaaatgcaaaaatgggcagacagtttttgcgagcccgggggatctgccaacgacacatgtgatgaataacaaaggctgcccaaggcagccttttcttaatgatcatgtttactcttcataaaaaccattaatatcaaaattgttcagattgaggttcaagccttttaattgctttaataaagcatcgaatgtaaggaaatgatcatttttacattccgccgggacatcatttggagaaaatagtttcattcctccctcaatccactgtttccggtataactgaaatgccgcttcaattaaatgatcaggcgttacaataaaccctaagcttatttcatggtcctcgctgtagccgaattcaaacccgcagcaggggcaaatatcaaatgttttttgatattcgccgttataaacgggacttgtctctaatcctttaaatccgcatatcaaacaagggtacaactcactaaccaacatacatccctcttttattcagtttgcaatcattcagaacaagcggggaggccttttacagtttcccggttaaaaactgagcctcaccaagcccgaagctccaatcggcgttcccgttttctgtaatggaaatcatgatgtcctcgggtgatatgccgcattctgttttaagctgatcagccatcagttgatataacgtttctttttgatgttcggtgcgcgctttgctgacaatgctgatgatgacaagatctttgcttcttttgaaaccgagcccggtatcttcaatgataagctcatgaggccgatgctggtgaacgatctgataacggtccgttacagggacgtcaaaagctttaaccatggcgtaatgggcggtatccagtaatttttttaatgctgcgtcatcccggccttcaataacgtcaaaacgaagtaatggcatattttattccccctgatggttttttatcatgtcgcaacttgtaaaaaagtataacagttaatcaaaatgtaatcaaattataaccaaaatatttatacattaatgcaatatcacagagaggcacatgttgttacaatcgcccaatcaatttcctcattttatgaatacgcttaagaataggcagacataaaggaggaaaaacatgtaccctcgtcatgcattgtatcgcgggaatttcggtcctgccggatttccggcgagaagtccttttttgttcggcgctcctttattcggcggatttttaggcggtcttctcggaggcgtgattgccacaggctttacaagaccccgctatccgtacgggttcgccggttacggatacggaggcgtcccatacggcggtttcgggccgggagccggcggttatccgccattttattaaagaaaaaacggcctgcatcgcgcgggccgtttttttatcttaaaatctccacttccgatagattgtagtcttcctgttttgaaaacataacttcaatcatcccgtctttatagactgcttttgttcctttccgtttgacgaggctcggaaggacgatttctttttttccttctcccagactgctgttctctacaacgaggctgtgtgacgtatgcttaatcctgatacggtcgagttcctcttgttctgcgggaattttcgcaaaaacatgatcggatgtttcaaaaaggtcaatttccggcttgggcggctccgcttcgaccggatcggcctttttggacattgggtcgcgaaaagggaactgtccggcataaccggcgccgaatacgctttccatcactcggttgacatatgtctcgacatctttcggatcagcatttttaaacgtttctttagagaactgattttggaagggaaaatatctgttccaatcaaacacggcatctcaccctttcttaacggacaacatagtatatgcccgccggaagcttcccgtgatataatataatctgtttacagaaaggaaggggaaagccgtgcaagggaataacgcaagaaaaggaatcatttataccgcttgttctttcgtcatgtgggggctgtttccggtctattggaaacttcttgaacaaatacccgcattggatattttagctcaccggattttatggtcatttgttttcatgtgtgtgcttttaactgtgcttaagaagtggaaaaccggatggcgtgaactgcgtcttttgaaatcggaagggggcctgctggcgctttttttcgcttccgttttaatttccgttaattggtttgtgtacatatgggccgtcaatcacggctttttgcttgaagcaagtctcgggtactacattaatccgctcgtttccgttcttttgggcatcctattcttaaaagaaaagcttaacaagatgcaaacagcagccgtttctattgccggggcggccgtgatcatatctgcgtttcaatatggcgcggttccttatatcgcattgctgcttgcattcagcttcggcctgtacggcttatgtaaaaaaagaacccgcatgtccagcacgatcggactgacgctggagacgcttttgattaccccggctgcacttatttatttaggatatacagctgacgggagcacttccgggtccttgggggcaggaacatgggcgctcctattctgcgcaggcgtatttacggccctgccgctgttgctgtttgcagagggggcaaagcgtctgccgctgtatcaagtcggcattttgcaatatatagcgccgaccattacccttatgctcggcgtatttgtgtatcatgaaccgttttccgggcaaaaagcgtttaccttcatttgtatatgggcagcattgcttttgtttaccttttcacagataaaatggaagcggccgataaaaagccgctaagcctttcgctttccagcgatagcttaaattatgtataatcattacgagtatgtaaaggagctgtacaatgggcactgataaagacatagcaaaagcctatcaggcactgtggaataaccgcactctcccggcttcaactcttgaagaagcggagaaggcaattgatctggaactgcttgatcaaagaacacatccgaggctccggaagtcacccgaggaaaagtttgctctggcggtgcagcgaattgtagattcccggctgcggccgattgagaaatatgaattggttgaactacatacgaagcgtttgcaatttttaaaagaagaaagaggggagcagctatgaaagcgatcataaaagaagatgtgcaaacttctttagagcgatatgccgatcgtcctgtatatatccatttggaaacaacgaccggttcttattcagcgcatctgaatgagaaaaacatgacggttgtagcctatatacgcaatgcaaaagtgacgtaccatcaggcgaaaatcaaaggaaacggcccgtaccgcgtcggtttgaaaacggaagaaggctggatttacgcagaaggtctgactgaatatacagtagatgacgaaaaccgcttgttaatggcagggcatctgccgggcggaaaattggcgatttcgcttcaaatcagcgaaaagccgtttacagtttaaagaaaagggtgaaaatcatgaaagaacatgtactcgtcatcctgcctcaccctgatgatgaatcatacggagtggcagggctgattgctttacacagacaaaaagatattcccgttacgtatgcatgcgcaacgcttggcgaaatgggccggaacatgggagatccttttttcgcgaaccgtgaaacactgccgctgttaagaaaacaagagctgatcgacgcatgcaaagcaatggacgttactgacctgagaatgctcgggcttcgtgataaaacacttgaatttgaagatgacgagtggctcgctgatatgatggaagagattatcgacgatgtaaaaccgagtctgattgtcacattctatccggagcacggcgtccatccggatcatgatgcatgcggcgaagcggttatcagagcgctttacagaaagaaaaaagaggaccgcccgcgcacgctttgcatggcaatcacccgcaacagggaggaagccgtcggcaagcctgatgttattcttgatattaaagaggttgccgatattaaaatgaatgccttaaaagcgcaccgcacccaaacggaaggcatgctgagagagctggaagaaaaaataaaaaataacgagccggttcttcagacatggtttgaagaagaagtgtattggacatatccgtggaaagactgataaaaaaagggataaggctgaaatgccttatccctttttttgtgtcagatcggaagcgatcgcttctgcaagcgaagaccttattgataaatttgaaaaactcagtcccagctgcactgcggtttgggcgatttcaggacggattccggataatgtcgctttcacgccgagcattccgagtgattcaattaaggtgaaaagctgttgggcaaccatcgtatcaatcatggctacgcccgataaatcaatgtacagctgcgtgatgcgcttctctgaacactggtgcagcgtattctccaaaatcattttggctcttgccgtgtcaatatccccgatcagcggcagcagtccgacattgtcaaaaagcacaattaccggcgagctcagctcggtgatcaattctttttgcgcttcaagctgaatgtttgtgtttttatacatttcttctatgaaaatatgaatgaccacatcaaaagatttgatcagcgtatggaatatatcttcggcatcttcttctgtcacggtgtcggcatgaagtctggtaaactgcttgacatggccgacatacaaatcacgaactctgataaactcgcgaataatataatggatgggagtttttaaatgttctttatcccgtgcggcttcaaacgcccacttttccaatgccgctgtatatacttccttctcttcagaaaaaatccgattgagttgataattaaacgccagattttgttttttcagatttgtgagtacagccgggtcagtagaagcataaacagaatcaggatccgtttcatgaagcgtatcaaaccatgtctgactgatgtcctccgcccgttcagttaaataatcgtacagcagtttatgttttggcattgctgctcctcctttataaaatcgtcatttttttcacataatgcttttgtagtttcatcagtctgaagaataaaccgagagctcctgcggcaagtcccgcaattaacccgatccagtagccgtatgccccgaggcccgtataagtgccgactgcgtaaccgaccggaagcccgataatccaatacgacacaaaagccgcgccgagtgtataattgacatccttatatcctctcaaagcgccttgtatcggagctgctacggcatcagaaagctggaaaaacagcgcatagattaaaaagtgctgcgtcaacatgagcaccgccggatctgatgtatacattccggcgatttgcggtctgaacagcaaaatgaaagccgccgtgcataaagaaaaacaaagggccatcacaatgccgatatagctgtatgaccgggcatccctgtagcgctttgcgcctgcttcaaatccgactaaaatggtcatggccatggatacgctgagcggcagcatatacaagagggaagcaaaattcattgccgcttggtgggctgcaatcgtcaccgtctgaaaatggctcataagcagtgtgacagccgcaaaaatgctcgtttcaaaaaataccgcaaaaccgataggcaatccgattttcaaaagcttcctgcattcagacggagaaaaacggtacagtttccgaaatacagagtacccggcaaacggctcaaatctgcagacgataaaaaagctgatggcgcaaatacaccagtaagtcagggcggaagcgagccccgccccgactcctcccaatgccggcatgttgaatttcccgaaaataaatacataatttaaaacaaaattaataggcaatgagcaaagcgtaataagcattgtgactcgcgttttgccgagtgcgtcaataaacgagcgcaaaacggtgtacacaaacaaaggaaaaataccgagggataaaaagcctaaaaagtgttttgcgatcgtccggacacgaggttccaggcccaaatgtcccaagatcatatcaacggtgaaaaagccgatcaggataaccgccgcactgagaacggccgctacataaacggcctggatgacggaaaacggcacttccttttgtctgccggctccaaacagctgcgaaacaacgggcgtaacggccattaatattcctgcaaggcccgtataaaccggcgtccacaggcttgaaccaattgcaaccccggctaaatcggcagcgctcactttccctgacatcaccgtatccaaaaaggtgatcagggaaaggcccgcctgtgtgattaaaatcggaatgaagatatgtaacagctgtctgaccttttggccgatcgtgttcgtttctctcaagttaggttccccgtttctttattttaacgagagaaattataacattttatgtataaaaagcaatgaaagccggcctactcttttttgtccggtttcggctttttaaacatcttggcataaatgaatgaaagtgaaatgacccctaaaaaggtgcagatatattgcatcagccgtgcgaattccatatgatgtgcgcctcctttcatgattatggtgcacacagcggcgcatatccatgcgcgcgatgcagaaaataagggaaaggagctgatgtgacatgcgccacactcaaatgacggaaagcgcgtttaccgctgccgttcaaacgtatttgaaacaaattacggaggatgccggaatgatactgcggacattggatgaaaaagaccaatgccttctttgcgaattagatgaactgggacatacgtttcaggaaatgcaggctgtcgcttcgtcgttttacctgcagtcatatatcgaacactttacgccttcctatacagagctggcgagggccgtgcagcatctggcggaagaaaaacacggagcgctgattgtgattgaacgtgcagatccgctggacggaatgatacaaaaagggaccagcctgcatgccgagatcagtgcagctttaattgagagtattttttatcccggcaatccgcttcatgacggagccgtattggtcagagaaaaccgggttgtatcagcagccaatgtgctcccgctcacaacaaaacatgtcgatctcaaatacgggacgcgccacagggccgcgatgggactttcggccgtgactgatgcactcgtgctcgttgtttcagaagaaacgggaaaaatgtcctttgctaaagacggcggactgtatccgcttgtttcgccgcgggcgcttcatacgaaataataagaaaatgggaatattgtacccatttaatattaataaggtgaacatctttacctttttctgtattgatgttatcgtttaaatatacataaaatttaaaagaatagggagtggaaagatggcaaatgtattgatgatcggctttccgggagaaggccatatcaatccgtctttaggcgtcgtaaaagaactgaaggcaaaaggggaacatgtcgtatattacggcgtgaaggaatatgagaacaaaatcgcgtcaagcggagcggaattccgtgaatatgaagatttccgaaaagatgaattcggaaaaaatgcaacgggtgatgaacagcgggacgctaccgagtttttgctattaatgattgagacttccaaaaaagccgcactccgtattcttgaggaagtaaaagatgaatcctacgactacatcctgtatgatcatcattttctggcaggaaggctcgtgagaaaccagctgaaactgccggcatattcactttgtacgacatttgcaatgaatgaagcatttattaaagaagtgttttcaaatacaaaccttgtatcagaggaatcatctcattatccggcttataccgaagcggtcagccggctcaatgaagaattcagcgcagacattaaaacgccgtatgatattttctcaaatgacggcagaaaaaccattgtatttacttcaagagcgtttcagccgaaagaagaagagtttggcgattcttatctctttgtcggtccgtccataaccgaaagggcggcggctcaagatttcccgtttgaacagcttgaaggagaaaaagtcctgtttatttccatgggtacgatttttaacaatcagaaggaattgtttaataaatgcttaaaagcggtcagaaactttaacggaaaagccgtcatgtcaatcggcaaacatcttgatccggcggagcttgatgaaattcctgagaatgtcattgtcaagccttatgttccgcagcttgagatcctgaagagagcagacttatttatcactcacggcgggatgaacagtacgagcgaagggctttactacaaaaccccgatgattgtcattccgatgggcgcagatcagttcgccgtcggaagccaagtggaaaacacgggcgcgggcaaaatgtttaaaaaagaagatgtaacagcggaactgctcactgaagcaataaaagaattgagcgaaaatcctgaatatcagacaaaagcttctgaaatcggagaatccctgaaagcggccggcggagcacagcgtgcagcggaattgatagcagaagacgtgaaaactgccgagacccgggttctgtaatcagccgtcacccgcttcctttaaaggaagcgggctttttttgattgtttttcgggaggatttttcacgccgtaaagagaattgtatgaaaaacagacaagaaaggtggaatgtcgcggaaaaaagccatgttatgaaaatgattccaaagtcttttgtgaaatgttctcaatttatgtaaaatgtgtggcattggtgatgatctaaggccaaatgaatcggaattaatgtcgacttctgaatgaatcctgcataacaggcggcgtccaaagaaaaggaacgtccctttcagcaatgataaataggaggtttttcgttatatgaagaaaaaaatcgcagccggactggctgtatctgcagtaatgacttcaaccttcgccgtgcatcccgctgaagcaaaaaccattcaagtaaaaagcggcgactctctttggaagctttcccggcaatatcatacaagtatttcagccctgcaggcggaaaataaactgaaatcaacgatactccacccaggacagcggctgcacattcccggcggcagcggcacacataaaacggggcaaaagggaaaacgaagcacgggtgcctacacagttacatacggagactcgttatgggtgatcgcaaaaaaatacaaaatgagcgtttctgagctgagaagcctgaaccgtttgagttcagatgtcatctatccgggccagaaactgaaaattaaagggtctgccggcggcacggacggaggcggcagacagacaaagcctgataaaggcgcatcagggacttacactgtgaagccgggtgactcgctgtggaaaatcgccaatcaaaccggcatcaccatcgccgaactgaaaaagctgaatcaattaacatcagacatgctgtatccgaatcaagtgttaaagatcaaaggttcttcacataacggaaacagcggcacaacaccgccatctcattcaaatccttctgagaagccatccacttacaaagtaaaagcaggcgattccctctggaaaattgctaatcggttcggcatcaccgctcagctcatcagagaaaaaaataaattgacaactgatgtgcttcaaatcggacaagttctggtgattaacggaacgggaaaaacagaagatcctgtgcggcagccggataacaaaccggcaaaaccaaacaagccgaatactcccgaacctccggtgacagggtcaaagattgacagaatgataggcgaggcgaaaaaacatgtcggcgtgccttaccgctggggaggcaatacgcctgcgggcttcgattgcagcggttacatctattaccttttaaataaggtaagctctgtttcccgtctgagcacggccggatattggaatacgatgaaacatatcagccagccgtcagcaggcgactttgtcttctttacgacatataaagcgggcccttctcatatgggaatgtatttaggcggaggagattttattcacgcaagctcctccggggttgaagtttcaaacttaagcaatccgtattggaaaaaagcttatttaggagcgcgcagttatttttaaaaaaagcctttcggggctttttttgtttaccatttttacgttttgacaagactgatgggtaaaaaataagggggaggaagcatgaatcgtctcttgctttttctcatgctcgcatcaattacgctttgcggctgcggggggagacccgctcctgttccgcccaaaaaacatggggaaagccgcgcattggaagcatctgcataccgtgagcatgccggactcatcaatcaaaacggaaaaacgatcggatatatcgaagtgagggaatctgatgatgaagggtcagacattcatatatcagcggggcatctgccgcccggcacttctctcgggtttcatatttatgaaaaagggacatgtcaggcacctgatttcgaatcagccggcggtccgttcaaccctttgaacaaagaacacggcttcaacaatccgatgggtcatcacgccggggatctccccaatcttgaagtgggggctgacggtaaagtggatgtcattatgaacgcgccgcaaacttcattaaaagaagggagcagactcagcctgctcgaccgggacggaagcgcgttcgtcattcatgaacatacggacgattatttgacaaacccgagcggaaattccggagccagaatcgcctgcgctcccctgacaaaaagcgcccgcagggaatgagcccttttgtattgagtatacaagggcttttttagtatactcggttatggaatacaaatggaaaggaaacatcacctatgacttcagaattacagcacctatcacttccggaagatatacaaaacaaactgcaggcttatcaaaatcatcccgtttcccaagaattccgggatttaatcggatcatcaggctatgaggccgaagataaagcgattgtattcgatgccgtcattgctttgacaatgggaaaaaatatcttattaaaaggaccgacgggttcagggaaaacaaaattggcggaaacgctttcgaactattttcataaaccgatgcacagcgtcaactgctccgtagacctcgatgcagaagcgcttgtcggctataaaacgattgaaaatgaacagggacaggcgacaattgaattcgttcccggacctgtaacaaccgcaatgaacgagggacattttttatacattgacgaaatcaatatggcaaagcctgaaacccttccgattctaaacggcgtgctagattacagaaaaatgatgacaaatccctttacaggagaagtgattaaggcaagcgaaggattcggtgttatcgccgcgattaatgaaggctacgtcggcaccgttccgctgaacgaagcccttaaaaaccgttttgtcatcattgatgttccgtatattaaaggaagcctcctgaaacaggtgctgacctctcagtctgtcttaaaagatgagaaattaattgagcgttttatgacgctgtcttctgatttaatcgcacaagcgcataacggacaagtgtcagaagaagcggcgtccatcagggctctcattgatacgtgcgacttggctgcgtacatcccgccgaaacgggcgattgaaagaggcatcgtagaaaaacttgacgatgacagggaaaaagccgctgtcagaaatattgcagaaacgctgttcgaatgagggatatacaatgaagtttatcaaatttaacgacagcacgattgattcgtttttgttcatgatgctgactgacctggccaaaacactgaccagaagcagtgaagttgaagtggaatacggcgtgcagtcttactacaatccctttgaaaagaaaatttacatgagccacttttggaaagaccgatcagccggggatatggaagccggcctgaaaagcgatgtctatttgcgcgctgtcggaacacgcagcagctcatttcgggaatttgcggggtttttaaatgacgttcaccggcatttcacccgccaaagctttgccaagcagctgtttatgctgcttgaggatatcagaattgaagagctgaccaaaaaagaacggccgggaacgaaacgtgtttttcagaagcggagggagatgtacaggaaatatttcacgacgcagctgacattgaatttagaacggagcattttcaccgacgctttgtattgcgcgatgtttgtcaagctgacggctgagtctccgcttgaaggcattccttccatgcatgaacatattgatatgatgataccgtatattgaacgtcagctcatccgggtgtatgaggcggattctacggaacaaatcgcaagaataacggaagacctcatggaaggccttgatgaagtgcttgagaaagatatgctgaacacgtacttttttctgccggaacttgattacgaaaaagcggctgaagagcctttattcgaaagtgtaaaaaaagcgccttcgttaagtgacgatctcacgctacctgagtcttccgacggagatgaagaaatctttgaagagaaaatgaatacgtggcaccgggaaaccgaagcgccggcaaaaagtttccttcaatttgatattgagcacggcgcgaaatcggatcttgggaaagacgcggccagagaaggcgatgacggtgaccaggcgctcggctccgttcaaggttccgcacgtcagacgaaaagagaggattactccaaactggaagcgcttgaatccattcaggatgaacatgagggcgcggggctggctgacggaaaagaaaacaaatttgccttcccggtttatcaaacgcctcataaagcgtctcctgaagaggagcagtcttataaagaacaggcaaaaacgatagaatcatatcaaaaacgcctgaagcagatgatacaaaaaacacttgagcacaaaaagacgctcccgcggaccgaccttcacgcaggccggctgaatcgcaaactgatccgctattttacggagcggaacccgcgccttttctataaaaagcaggacccgtcttcagacattgacgccgtttttacattgcttgtcgattgttcggccagcatgttcgacaaaatggatgaaacaaaaagagggatcgttctttttcatgaagccttgaaatcagtgtccgtaccgcaccagatcgtcggattttgggaggatacaaacgaagcgaccgaaacgagccagccgaatttcttcaataccgtcattccgtttgaagagtcgctgctgcaggcggcgggtccgctgatcatgcagcttgcgcctgaagaagataacagagacggatacgccatcagacaaatgacgaaacagctgatgcggcggagtgaggcgcaaaaatttttaatcgtgttttcagacggagagccggcagcattcggatacgaacaaaacggcattgtcgatacgagcgaggctgtcatcgaagcgagaaaaaaagggatagaagtcataaatgtttttctgtccaatactgcgatagaagaatcccaggtgaaaaccattcaggatatgtacggaaagtacagtatttttgttccggatgtcgatcagctgcccgatgtgctgtatccgctcttgaaaaaactgcttcataaaagcataggataggctttttcctatgctttttcgctttttattttaaaatgatttaattttttcggtattgatctgttttttttactattttgtgaacaatcaaggtagaatccaaacgcaatcagtggtaaaatatccttggaagcgtttttattacataattttgggcacagcgttcaaaagttatttcaagatagtgaattgatcacttgattatctaggttgggggtaatattcaaatgtttcaaaataatatgaaacaaagaatgaattgggaagatttttacggaccgaacctcggctacgcactggagctgtacgaccaatatgctgaagatccagacagcattgatccggatctgaaagacatgtttgacgaactaggcgctccgccaagccaaataaaagaggcatcgggaacaaaggaacagggacgcgtcaccgcagatctgattcaaaagatcgcagcagcagttaaacttgcagaagatattcgaacctatggccatctgaacgcttccgtcaatccgctcagaaaggatccgaaaaagagcgagctctttccgttatccgagtacgggcttacagaagaagaaatgaaagcaatacccgcgtctgtcatctgtaaagacgcacctgccaatataacaaacggcttagaagccatccagcatttacgcaatacctataaaagaaccatctccttcgagtttgaccatgtgcatgatttcgaagagcgcgcatggattacaaaaatggtcgaatccggagaactgttccggaaaaattcaccggaaaaactgtcagccgttttagaaagactgacggaagtagaaggatttgaacaatttttacaccggacattcgtcggtcagaagcgtttctcaattgaggggttagacgcgcttgtgccggttcttgacgacattatcgcccagtctgtgaaagcgggcacaaccaatgtcaatatcgggatggcgcacagaggccgtttaaatgtgcttgcgcatgtgctcggcaaaccgtatgagattattttctcagaattccagcacgcgccgaataaagaccttgtgccgtctgaaggatcgaccggcatcagctacggctggacgggcgatgtaaaataccacctcggtgcagacagacagcttcaggatgctgaaaccaaaagcgcgcggattacgcttgcaaataacccgagccatttggaattcatcaatccgattgttgaaggaagcacgcgggcggcacaggaaacaagaacgcaaaaggggtacccggttcaagacgaaacaaaatcgctcgccattttaattcacggtgacgcagcgtttccgggagaaggcattgtcgccgagacgctgaacttaagctctctgaaaggctatcaggtcggcggggccattcatatcatcgccaataatatgatcggctttacaactgaaagcgatgaatcacgatccacgaaatatgccagtgatttggcgaagggctatgaaattccgatcgttcacgtcaacgcggatgatccggaagcatgcctgtcagccgttaaatttgcggttgaataccggaagcggttcaataaagatttcttaatcgatttaatcgggtacagacggtacggccacaatgaaatggatgagccgtcaacgacacagccgatgctgtatgacgccgtcagaaaacacccgactgtcaagcggatctttgcggaaaaactcgtaagtgaaggactgatcagcgaggaaaaagcgcaaaacatcgaaacgacagtgacaaaacgaattgaagacgcctataaaaaggtgcccgccaaaaaagaagacgccgtacgggaaattgaattgccggaaccggtgtccaacggttttccagacgttgacacagccattgattttgatgttctccgcaagctgaacggcgaacttatcaactggccggaatcttttaacgtgttcggcaagctgaaaagaatcctggaaagacgtgcaaaagcgtttgatgatgaccgtaaagttgaatggtcattggctgaatcgcttgcgtttgcttccattttgaaagacggcacgccgatccggctgaccggacaggattcagagcgcggaacgttcgctcaaagaaaccttgtgctgcatgacagcgaaacaggagaagaatttgttgccctccatcacttagacgactgcgctgcttcatttacggtgcataacagcccgctctctgaaggatcggttctcggctttgaatatggatacaacgtgtattcgcctgaaacgcttgtgatgtgggaggcgcagtacggggactttgccaatgcggctcaagtctattttgatcaattcatatctgcaggacgggcaaaatggggacaaaaatcaggactggtcatgctgctgcctcacggttacgaagggcagggccctgaacactccagcggccgcgtcgagcggttcctgcagctggcggcggaaaacaactggacggtggccaacctgacaagtgcggctcagtatttccatattttaagaagacaagcgaaaatgctgcttcgtgaggaaatccgcccgcttgtgatcatgacgccgaagagcctgctgcgcaacccgaatacggtatctgaagtgcaggaactgagcgaaagccgattcaagcctgtctatgagcagtccggtctttcccatgcttgcgaaaaagtgactcgcgtcgtattatcaagcggaaaagtgtcaattgatatcagcgatcacttcaacaaaatggaaggcgataaggattggcttcatattgccagaatcgaacagctgtatccgttcccggcaaaagatacgaaggagcttttcgccaaactgccgaacctgcaagagatcgtttgggttcaggaagagccgcagaacatgggggcatggagttatatcagcccgtatctgacggaaatcgcgccaaaaggagtaaatgtccaatacatcggccgaagaagacgatccagtcccgcagaaggagatccgacagtccacaaaaaagaacaggaacgcattgtatctgatagcttgactcgcaaaaactaagggggaaatgaaaaaatggcggaaattaaggtacctgaattagcagaatcaatctcagaaggaacgatagcccaatggttaaagcagcccggtgattatgtagaacagggtgagtacttgcttgaactggagacggataaagtaaatgttgaattgacagcagaagaatcgggtgttctaaaagaggtattgaaagattcgggtgataccgtccaagtaggagaaattatcggtaccattacagaaggcgctggcgaaagttctgcacccgccccttcagaaagtgctccagccaatgaacaaacgaaagaggaagcaaaagctgaacctgctgcacaagaagtcagccaggaagcacaatcagaagcgaaatccagaacggtagcgtctccggctgcacgcaagctggcaagggaaaaaggaattgatctatcacaaattccgacgggagacccgctcggccgcgtgcgcaaacaagatgtggaagcttatgaaaaaccggcttcaaaacctgcggcacagccgaaacagcaggctccaaaaacacagcaaagctttgacaaacctgtcgaagtgcaaaaaatgtcccgccgcagacagacgatcgcgaaacgattggttgaagtgcagcagacttctgcgatgctgactacatttaacgaagttgatatgacggccgttatgaatctaagaaaacgccgtaaagaccaattccttgagcaaaacgaagtaaaactcggtttcatgtcgttctttacaaaagccgtcgtggctgcattgaaaaaattcccgctccttaacgctgaaattcaaggcgatgagctgatcgtgaaaaaattctatgacatcggtattgctgtcgcggctgaagaagggcttgtcgtcccagtcgtgcgtgacgctgaccgcctgacgtttgccggcattgaaagagagatcggcgaacttgcgaagaaagcgcgaaacaataaattaacattaggtgagctgcaaggaggctccttcacgatcacaaacggaggtacattcggatcgcttatgtcaacaccgatcctaaacagccctcaggttgggatcttaggtatgcacaaaattcagctgcgcccagtagcgattgatgcggagcgctctgaaaaccgtccgatgatgtacatcgctttatcatacgatcacagaattgtagatggtaaagaagcggtcggattccttgtcaccattaaaaacctgcttgaagatccggaacagctgttgctggaaggataatttgagacagacaaaaagtacactgcccttacaagcagtgtactttttttattgagagaaggggagaatttatatgaaaagctgttatccgcttgagatcgaatttgaatataatgaagaattgcattctatcactccggttcttctgcaagacgaacatgacacgatattaatagactgcggatatcccggttttacaaaccatcttcaacatgccgctgcccggcatggaatgtcgcttcattcattgacaaaaatcattgtaacgcatcacgacatagaccatatcggctcactcgctgcattataccgtttacatccggatgtcagcgtgacagtacatgagcgtgaagccccgtatattgacggctctaaaaaatctttacggcttgagcaggctgaatcaacgttttgttcattgccagaggatgcaaagccttatgcaaaacagttcatccgctcgcttcaatcagtcgaatcggctccagttcaccggacagttactgacggcgagctgctgccttggtgcggaggcattcgcgttgtagccacgccgggtcatacacccggccatatcagtctttatctgcctgccgaaaaaactatggtcacaggtgatgcggtcgtcattgaagacggaaagctgaaccttgctaatcccggctatacgttacatatggatgatgcggtccgttctgtgcagcggctgctcgattatgatatccgccaattgatttgttatcatggaggtttatttcagggggatgtaaaaaaagcgcttttgcgtctgtttcgtgatctgcagaataaacaaggataggagcggcagcagcctatccttgttcagttatgaaaacggaatctttgccgtttcttcttcttcggcgctgtttttctcttttttcttagaccagtaggtggcaagaacagaccccgacagattgtgccatatgctgaaaattgcgctcggcacggctgacaaaggggagaaatgcgctgtcgcaagcgctgcgcccagtccggagttttgcattccgacttcgatcgcaatcgctttttgtgaagcataatccattttgaacagctttgcagtcaggaatcctaacaaatatccgattccgttatgtaagatgacgacagacacaatcagcagtcctgattgaagcagatgctcacgatttacgctgacgacagaggatacaatcgctacgatgccgattaccgacacgagaggaagcgcgtgcacggcttgtccgacctgttttttgaagaacagcttcacaatcaccccgaggacgatcggcaaaagcacggcttgcataatggaaacaaacagtgagccgaaagaaacggggagccactctttcgcaaacagcataataagtgccggcgttacaataggagcaagcaatgttgagatcgtggtgaccgcaacagaaagcgccgtattgcctttcgccaaaaacgtcatgacgtttgatgccgtaccgcccggacagcatccgaccagaatgacgcccgcggcgatttctgcggggaggcggagcccgattgataaacagaaagccgtaagcggcataatcgtaaactgggcagcgactccgatcacgacatgccaaggctttctgattaattctttaaaatcgtctgcttgaagagtaagccccatcccaaacataataataccaaggaaaatcgtcatataagaactgatccaagaaaacaaatcagggcaggcgaatcctaaaccggcaaagacgataacccacaagccaaaggtttggcccgcaaacctgcttatttttttcagccattccataaacacagctccttttacattcaatcaatcagtcagaaaatatgactgacttttctgtattccattataaataattttctgaataattcaatattaaatataagttttcaataaaattattatgtaaactaacatcttcttgactattcagacatatattcttacaattgatttttatactgaaatgaattgggagtgctgaagtgaaagaagctaatcaatggtcatctaagctgggatttattttagctacggccggctctgcaatcgggctcggcgcaatatggaagttcccttacgtagcgggaaccagcggaggcggcgcttttctgcttgtttttattttatttactgttttaatcggactgccgcttttgcttgctgaatttattatcggcagaaaaacacaaaaaaacgccgttgaatcctataaggcgctcgcgccggggaaaaagtggcactggatcggatatctcggaatcattacgtgttttattctattatccttctacagcgtagtggggggatggatattaatctacattataaaaggctttacaggcggcttatcgctttcttcgggatttgatacgttatttatcgataccatttcaaatccttatgcagccgttttcggccagctgctgtttatcgtgctgacgattttagttgtggcaaaaggggtgagcagcggaatcgaaaaggtaagccaggtgctgatgccggctctgtttattctgtttattctcttaatgatccgctccgttacgctgcatgatgcagcaaaaggattaaaattcttttttatgcctgattttggcgcgatggatgccaataccattttatatgcgatgggacaatcatttttctcgttaagcgtcggagtgtccgtaatggttacatacagcgcatatttagaaaaagaagaaaatattgttcaatccgccgtatcggtgacggtattaaatgtccttgttgctgtgatggcgggagtggcgatttttccggcggtgtttgcattcggcctcaagccggatcaaggcccgcagcttttatttaacgtgctgccgaccgtctttaaccaaatgccgttgggcatcgtgtttttactcgcctttttgctgctgtttttatttgcgacgctgacatcggctttttcaatgcttgaaattttagttgctgttttgtcaaaaggcgattcggcaaaacggaagcggtatgcatggatcgggggacttgctatatttattgtcggggtcccttcggcgctgtcgtacggaattttgagtgatgtttctatttttcaccgcagtatttttgacgctgcggattttctggtcagcaatgtcttaatgccgctgggcgcgcttttaattgccgttttcgtaccgctgaaaattccgaaacagatgctgtttgacgaactgaaaagcggttccggtataaaacgaaaatggtttgcagtctggctcctattaatccgttatgtggctcctgtagccattattatcgtttttctgcacgtccttggtattttttaaaccaaaagaagcaggcccccgttcaagacgggggcttttttaataaagcggccatatcacgcggtgcgcttgctcgaaccgtttctccgcctcccgccaatcaacgacattccaccattgatccacgtaagccgctcggtcgtttttatattgtaagtaataagcgtgttcccacacatccagcggaagcaaaggaatgacgtcccactggctgtagagctgatgcttctcagcggccaaaatctccagccgcccggcgcgcggcgcccagactaggatagcccagccgactccttcgacttttttcgccgcttgagaaaattgctctttaaaagcggagtagcttccgaatgacacatcaatcatttgaaagagtgcacccgtcggccgtctttttccgtttggattcatcgaaaaccagaaaatactgtgcaaataatggcccgcgccgtgaaacgccaattgtcgcccccaatgtgccactaagtcgtactgtttcgtctgtctcgcttttttgagctccagttctgctttattcagaccgtcaacatagctctgatggtgttttgtatggtgaagtttcataatctctcttgaaatatacggttccagtgcggaataactgtaaggcagtttagggaggacatgcttgccgatcggcacataagctctgcgctcatccggctcttcgggttcagtaatgtcccggtaaagtgccgatgcttgttcgtaccattccgcctccgttaatccatcatcctgaagggtgtgaaaaatccggtcgatttgtgccgcgaagcgatcgaaccgaccttgctgaataacttgttccttcaaggtttcacaccaattcagcatttcggtttgataagcgtgccgtttcatttttcttcctccttttcactcattttcataaaagtgctgagcgcaagcaaagaaaacacatacgggtagctgtgatacctgatgtaaaactgcttcggcaggccgattccggtcggatagctgaaagcggctccttcgtaatgccggttttcaataagaaaagatatgccttttgtgacggcttgatgatgagttttttcgtattgcagcaaagcttcggccgcccaagccgtctgtacaagcgtcccgtaagaaagcggaacataggttttctcttctgcgcttttacaggattccccccagcttccgtcctcgttttgaatggacttcagccagcggatcgcttttttcacggccgggtggttttggctcacgccgcaagccttcatccctgtcagcgctgcccatgtgccgtaaatatagcagaccccccatctgccgtaccacgatccgtcctcttcttgatggcggatcagccattggacggccttttcaatctgagggtgatcagaagaaagccccgcttctcctaaacagtgcagcacccgcccggttaagtcgcttgttgagggatcgatggcagcttcctcagccgattccagcggcagcaggcggaccagcggatgattgacatttttctcaaaagcagagaagccgccgtcactgttttgcatggacaaaagccagctcagtccgcgttcccatgaggcgggataaagttttcgcggaatggctttgagcactgcggctgtgtcatcacaatcaggattatttgtattgatgtttgaaaaaccccatcctcccggttcagcatgcgggttgtgaacggcccaatcagcgactttcgtctgctgccgttcacgcagaaaccgggcggcgctggttatcatctgatcgttatctgagatcccgcttttcataagcgcatagttgagaagcgccgtatcccaaacggtcgacgttgaattttccaggtacggtatatcgccgcaagacgtgagcaaagctttcgtgccggcaagtgcttttctgataacgggggagtggcgcgatacaccgagagcgagcaggccgtacaccataaaaatagtggcgctcgcatagctgtataatgtgccgtcttcttcaatccggtcaagcatatacgttttggccgtacgcagaccgagctggtgaaaagcggcaggaatctgcaaaagccgcttccagtgcgcgaaaagagaagagaggtctttgttctcatcctgatcggaacgaagccatgtaaacggatttttagtcatatgccgatctaaatgcgcgagagacggaacgttgggatttttcagcgaaaatcttttgttaagcgtcacggccatcggtacaaaatgaatacgggcgtatgtactgaactggtaaaaatgcagcgggaaggatgggggaatgactaagaaagataatggcagatgcagcgcgggccatggataaaggccgtttgccgcaagcatccactttgtcatgaagtgtacgttgcgcaagccgccatttgagatgataaagcgttcggcctgaatcatatgcgcctcagaacggctatataaaccggaagccagcaagccggcatagccctgtacagtggcggtcacatttcctttccggtcatcaggatagttggcaaaagttccgtccgggcgctgtttagcgcgaatgccttctgcaagctcagcgatcagttctttatcattgtctccaagagaagtgaggaggaggatcagaaaggcgtttgtcaaaatcggtccttcaaaacaaaatgaccatgagccgtccgcattttgcgtttctcttaatagggagatggttttcttttggcggcttctgacgttttcatgaattgtgctcacactcgctcaactccttcagaagcatatatattcatatgtaaaaggcggcatgacaaaagaaagaaactgctgacaggcagcagtttcttgtttgattaatcttccagattgatccagacgcttttcacttctgtataattattcagcgcgtaagagcccatttcccgcccgaggccggattgcttatagccgccgaaaggagatgccgcatcgaaaacattgtagcagttgacccaaacggtgccggcttggagacggtcagcaatgtaatgggcgtttttcacattctcagtccaaagtccggctgcaaggccgtattccgagcggttcgcccgctcaatgacttcatctaccgtatcatacggaatggcggctaaaacagggccgaaaatttcttcttttgcgatggtcatgctgtcatccacatccgcaaatacagtcggggagacaaaatacccttcttcaaacgggcagctgccgcccgcgacagctttggctccttccgcttttcctttttcaatatatgaaagcacgcgctcatgctgttcctgactgacgagcgggccgatttgtgtatcttggtgaaggccggcgccttgctgaagcgatttcgcatatgaaaccatttcgctgacgacctcatcatatttgtctttgtgaatgaagacacgggagcctgcgcagcatacctgcccctgattaaacatgaccccgtttaaagcgccgggaatggctttcttcaaattggcgtcaggcaaaatgatgttaggtgactttccgccaagctccagtgtcacgcgtttaattttttttgcggctttttccatgatttttttgccgatttctgtagagccggtaaaagcgagtttatcgacatcgtcatggttggtcagcgcttccccggccgtctcgccgaaccctggaacaatattgatgacgccgtcagggaagcccgcctgatctattaattccgctaaatagagggcggtcagcggtgtctgctcggccggtttcaaaacgattgtgcagcctgtggcaagggcggcgcccattttccacatcgccataaggagcgggaagttccaagggatgatctgccccacgacgccgacaggctcatggcgggtgtaattaaaatatgagccggcgaccggaatcgtttgtccggttatctttgtagaccatccggcataataacgcatatgctcaattgcaagcgggatatccccattcgtcgtttcattaatcggttttccgttatcaagtgtttcaagctgcgcgagttccgttttgtgctcttccattaaatcggcaagcttatacatcagcctgcttctggaagcggccggcatagtgcgccattcgccgtgatcaaaggctttgcgtgccgctttcactgcactgtcaatgtcttctgtctgtgcctcgtaaagcgtcatcagcgtttctccggttgccggattcggtgtgacaaatgttgatcctgaagcgctaggaacaaattttccgtcaatataaagtttcttcgtgccctgtaaaaatgtttccagcctttttgtgatctgcatcgttaaagaactcattcgtaacaaacctcccgaaatttttttatggtctgttttgagcatcttgatgtccgcgcaaagtaagcgcatacagtcattctataataacagccccggtaaaatcaattgataaccgttattgcaattcacaagaaaaaacggctacaataagcttatcgattaagaaaaggagttttataaatgattcataataattggcagacaaaagaaagcgtcaaaaaggtcaaatgcgtacatacagatgcgaaaaaatacattgtcaaaaatgtgctgacgccgggtaaagagtatgaagtcaaaaatgaaacagaagaattcatttttgttgtagacaatacaaacaaagtcggaggcttctacaaagagtattttgaagaagtttaaagctgaatgaattcattttgcctgagccatactaaaaaagactacatataaagggtggctgcaaaatgaaaaaaacagagcaagacaaacaaaataaaacatcagatcagcttcagcaagtgcaacctgaagaaggcaccgacacgacgatggaacaaatttcagatacctataaagaaggaacaattgaagatacggatcgttgatgttttgttgaaaccgcggcattggagaagccgcggttttttatggcgaaaataaaaaactgacttttcgaaaaaaataccgttttcttgaaaccttttctttcgctgaaccgtactacttcataacagcggcacctttcgcgaagggcttttttgatgaacgttctaaaaatgtaatctgttcgtaatggtttaaatgccgtctatgtcgtattcttatatagggataaagaacttatttttttatgattgtaataaaacaatagtatagaagcagaaagtggggttcttcattgggaattttttctgtcagcagatcaaccgacacaaaaaagctggaggctttgctcgttgagggagaacggatcgaaacgatttataaactgcgggttgaccaaatatgctttacgaataaacgagtgattttctttgataataaaatgttctccaaaaagaaagtgcgcgtatttcttccatataaaacaattgaaagcttcgccattcaagaagcggggatgtttgatcccgataccgggcttgtattaatgacaaggggaaaaactttcgaattggaatttgcaaaagaaacggacttgactgaggttcaagccatcttaacaaaatacttatgcagttaaatatcacataaaagccatccgaatgcatgcggatggcctttttattatataatgcttgtttttccggagttcgaatcaatgagatccggatcagcaatagaactgatggggatataaatcggcgccaaatcaccattttcttcaccgaatccgtagttgatcttattggataaaaaataatcgatttgctgatacgggccgatcgtaatggaagaaccgcggtcgactgcatttactttaaagcctcctacatttaccaaaaccggcgaaaacatcataatgggcctccttttccggcagggattttatcgcatgcagactcaaaggtagatggagaatcaatttgatcccggtcatccactttgccgttcgtgccgatgaagccgcttgcatctccgaagttctgtccgtatccctgattctttttatcagaattctgccattccgccagtaaattttgtccgacattcaccgctgaagcattttcaaaggaattaattttcaacatgaaaatattaatattgatatatggagttggttgaaccacaggcaaacctcctttaatacaggtgtatgccggctgttatgaccgtatgcttagacagggggcgataaaaatggatttcgataagatgaagcaatggatggaaatggcgcaaaacatgtccggcggcgacttttggaaaaacgtttttgatgatgaacaactgaaatcatttcaaaacggccattctcattttccctttcaacagggagatgggcaaatgagaagaaatgaggatgcttttcctcttatagatattgtggaaacccatgatgagctccaatttttactgtatctgcccggctaccggaaacaagatgttcagctgctgtcctacggagaatatatcgtcgtaaaaggcacgagaaaatccttttttaatgaacaggattttaaacagaagaccggaaaatacggcgattttgaaaaaaaactcgaccttccgcattccgctcagggaacaaagggaatgcaggcggtattcaaagacgggattttatatatatcgattgctaaacatctgggggatgcaagccagatcattatcgaaggctgatcttgtttgctgtgccatctatcagatctgaatcatcgatactcatgatagggatgacgacaacggtgcaatcaccgttttgttcaccgtacccttcatttcttttattggctgctgtgtttctcaccataacggaagagccggtgttaaaagttgctccgccgctgattccgttcatttttatatactcaaaattgataacggatggaaaaaacatcatgattcgcctcctttttgtatatcatgtttatatattcgcaatgcgggacgcatagaactttccaagagtgacggggaaagaagtgattttctttgaaaaaaataatgaaagagattttcaaaaaagtgtgtgaagaagatttagaccggcttaagaaagtggaacaacagcttgatgagcttcaggataagtgtcattttgagccgcagacggttgaaggggaaaaaacatatgtccatattgagcacgtcaaagtggacaaggttgaatacaatattgattttgaaaagctgagtatagaagagctgagcggtatgctgaatatcggcgccacttaccatacaccggcgcacaggctcaaacaagcctgcgctgaagaatttcgggacaacccgcaaaatgatgctgcgaaagaaaaaagacagacaaagcagcagacacccaatgtcaccatcagggggagaaagcattgaccccgttgtttcagcctcctttttcgagggtatgtattaacagtgcagcgaagaatacagacgaaaaaggagatgatgaatatgtcattatcaaaagtacagcaggacagcctttatcataaattaatcgatttaaaggaaagtcttcagggagaatcaaaagaaaatcattcaatgagtgaagacacaggagaactgtcgaacggagtagataatcacttagctgatcacggaagcatttatttggacagggtcacgaatcagacgctgtacggtgtcgatcagaatcttttagatgaggtgaacgccgcgcttaaacgaatggataaaggaacatacgggatttgcgagaaaacaggaaaagaaattccttatgaaagacttgaagccgtgccgtacgccagaatgaccgtcgaagcgcagcgagaaacagaaggggatgtgaaaacagacgctccgtcatatgaaagggaatttcacgagcaggtgaaagacctctcaaataaagaaaccgttgatcaaaaaagctcacaaacatacgaaatcctggatcgtgagcaggattcacaataatagcagcaggtacattcatatgtacctgtttttttattccataaaaaatctcaaaatcgaaataaaatcattgactttatataaaaaagaaagtaacatactatttgtaagtaaatattaaaagattagcgggaggaatttagaatgtctcaagtattatttgtaaaatcaagtgatcgtacggctgaagaaggcgtatccgtaaaattatacgaagcgtttctggctgcttataaagaaaacaatccgaatgatgaagtgatcgaacttgatcttcataaagaaaaccttccttacctcggaagagatatgattaacggaacatttaaagcttcaaaaggaattgaaatgacagacgaagagaaaaaacaagcgtcaactgctgacatttacttaaatcaatttgtcaaagctgacaaagtcgtgtttgcattcccgctttggaacttcacagtgcctgccgtgcttcatacttatgttgattacctgtctcgcgcaggagttactttcacatacacgcctgaaggaccaaaaggtctgatgggagataaaaaagtagcgctcttaaacgcacgcggcggcgtatattctgaaggaccgatggcatctcttgaaatgtcattaaacttcatgaaaaccgttctcggtttctggggtgtccaagatcttcacactgttgtcgttgaaggccataatgctgcaccggataacgctcaagcgatcattgaaaaaggactgcaagaagcgaaagatctggctgcaaaattctaattttcattaactcttgcgccctacagggtgtgagagttttttctattatagaagaaactggcggcagctttcgatctgatcttatattgatatattgatattttatcgaaaaaacaatttttatgtagaataaagcatttttcacatagaaaaaaggttttctgtaaaagaattaaccctcttgccaaaatacgactgatggtgtaggatataagagaagctacattgttcgtattgttaattaagttttaacctttaagctgtaatagggagttttatatcgaagccggaatgtcatgcctccattgcagaggacgacaggaacgtttctgcaaacacccactttgaggagtggtggtttaaaactttcttacttgcgtacggcatacgtagcgaaagccatttcccttgcggagatggctttttattttgaattgcccttgagcagcgtactttatcagtatgataaaatgaaagaatcaaagacaaagtgaggttttacaagatatgctggagaaagcccaatcccttctggcgcattattttggctacgacagtcttcgcgcgggccaaaagcaggcgatacaatcagttgcagaggaaagaaaaaacacggtctgcattatgccgacagggggcggaaaatcaatctgctatcagattcccgcactgctgtttgaaggaaccacaatcgttatttcccctcttatttccttaatgaaagatcaagtcgacgcgcttgaagaagcgggtatcgcggcagcttatattaacagcactcagacaagccgtgacattcatgagcgcctgaccggtttgaaacaaggggcttaccggctcttttacatcacaccggagcgtttgacttcttctgaattcattcacatcctgcagaatattacggttcctcttgtcgccattgacgaagctcactgtatatcgcaatggggacatgatttcaggccgagttaccggaatatcgaaatcctttttaatgaattaaaagaaccgcccgtcatcatcgcattaacggcgacggctacgcctgaggttcatgatgacatctgcaaacagcttcatattaagaaagaacaaactgtatataccggttttgccagagagaatttaacgtttaaagtagtaaagggcgaaaacaaagaccggtttatcgagcggtatctggaaaaaaataaacacgaagccggcattatatatacagcgacaagaaaagaaaccgaccgtttatatgagaaattaaaacgcggcggcatcaatgccggccgttatcacggcggattggcggatgatgacagaaaagaccagcaggagcggtttcttaacgatcagatacaagtgatggtagctacgtccgctttcggaatgggaatcgataagagcaacatcaggttcgttttacacgcgcagattccgaaagatatggagagctattaccaggaagccggacgggccgggcgcgacggtcttaacagcgagtgtgtgctcttgttttcgccgcaggatattatggtgcagcgttttttaatagaccaatcggccgccggagaagaaaaacaaaagcaggatctcaaaaaactgagacagatggtggattactgtcatacggaagattgcctgcagcggtttattctgaagtatttcggcgagaatgaggcggaagcttgcggagcatgcggcaattgcactgatacaaggaccgcccatgacgtcacaaaagaagcgcagatggtattgtcatgtatcatcagaatgaatgagcgcttcggaaaaacgatggtggcgcaggtgcttagcggatctaaaaataaaaaagtgctggaaaacggcttcatcagcctgtccacttacggcattatgaagcatcaatccgcagcggaaatcagtgattttatcgaattccttatttcagatgaatatatcagaatggcggacggcacatttccgacgcttatggtcacccaaaaaggcagggacgttctgcttggaaaaagcgcagtcgcgagaaaagaagccttacaggccgccgccgttaccgaaaatgatgaattatttgagcttctccggcgtctccgcaaagagattgcagctgaacagggcgtgcctccatttgtcgtgttctcagatcagacgttaaaagaaatgtcggcgaaacttccgaaaacggatcaggatcttctttccgtaaaaggggtcggggaacaaaaaagattgaaatacggagcagtttttttagaagaaatccgaaattatgtaagagaaacagagtgaaaaaaagtttttttagaaatttgcacattgtgtttttcattcgcgccggaaaaatcagaagcttgaaaacccttgctgtatcagggtttcagcaagacttaccaagcgagagaaatgtttcatgtaaaggaactgtaatctaattcaaatcgttttgttattgaactgacattttcatatgttacgatatcacctgttagccgccaataaaaagctaacaagggaggatttacttatgaagaagacgattatgtcctttgtcgcagttgcagcaatttcaacaactgcatttggagctcacgcttctgctaaagaaatcacggtgcaaaagggtgacacgctctgggggatctcgcaaaaaaacggagtgaacctaaaggacttaaaagaatggaatcagttatcttctgatttaatcattgaaggagagaaactgactatttcttcagtagaaacaaccacatctgggcagtacacagtgaagcagggcgacagcctctggaaaattgctcagaaattcggaacatcagtcggcaatctgaaaagcttgaataacttgcaatcagatataatttacgcaggcacaacgttaaatgtgaaaggtcaggctcaggctgcacagccggctcaagaagccagccagccgcaaactgaacaaaaaccagctgccgagacagaacagccgaaacaagaagctgtcaaaaacgagcagcctaaacaagaacctgttcaagaacaacaacctaaacaagaagcgaaggctgtcgaagcaaaacagcagcctgttcaatcaaatacaaaccaacaagagcctaaaaagcagctgacaatgactgcaactgcttactctgctaacgacggcggcatttccggtgtaacggcaaccggtgttgacttaaacaaaaaccctgatgcaaaagtcatcgcggtagaccctagtgtcattccgcttggctctaaggtttatgttgaaggttacggagtggcaacagcagcagatacaggcggcgcaattaaaggaaataaaattgacgtatttgttgcaaagaaaagtgacgctaacaactggggcgtcagaacagtaaatgttaaattattagactagtttcatatagagatgaagaacacaaggcgaaatgctttgtgttctttttttcttcccttttttgactgtatataatcgttatatgcggaaaaagaaaaagcgtttctctaatataataaggaatggatgtgaaaacggaatctgaagggatgtatgaatctaatggagccggaatttatatgtttatggaatgccttcacagaatcaccggtgtttcatgcaggtataccgctttcgccattgtgctcgttatcggactgtctatgcctgctgtcaggctgtttcaggcgcttgacagagggagaggaaggccagccgttattgaaaaggtgagacgtactggcgtgatgaagaatggcaggcacgagcttgtgcttattttaaacgtaaaaaactaagacggaacgcatgataaacgtgaactgacacatgccgtatataatgaagagatcagccgtttttatgaaggagcttccgtatgggtgacggcagcggctggcggacgaattatgatcgctccgcgcacgccgcggcataaggcgtcaaaataaaaagacggggcggttttcccggctttatgtattaatgccgatcgatccatatccgtccgccttctgagccggcttctatcctgcatgttcctccgatcgggaatgtcatcaaaggggaggtatggccgaaatcagcatttgcgataacaggcatggatgacagttcttcttttgtacggatgacggcacgcagagcctcctcagacacatttgaagcatgctggaaacgtccgatgacaattcccttcacggctgaaaaagcgggaaggtggatgagtgactgcaaatcccggtcaaacatatgaatgtccgacatataatcatcttctataaacagaatcacttgctccatctccggaaagtattcggtgccctgcagaagattcagcgtgcatagatttcctccgatcagtgttccttccgcatatccgggttgaataacgagcggtcccggattccgataaaaacgtctgtcctcctggttcaaataccatttatcatcactccactcggatgaaggctttacctcatacgggttgtcagaagcacagcaggccaagaaagacttaatcgtatagtccagcccttttttcatggcaaatgaagaaaagtggggaccggaatatgtaataaggccggttttttgatatatggcatggccgagagcggtaatatctgaatagccgcaaaggattttcggatgccgcttgatgttttcataatcaagatagcggagcagatgatttgattggaacccgccgagtgtcgtcaaaatcgctttgatgtcagggtcagcgaaagcttcgtgcagatcctgtacacgcgattcaatggatgatgaatcaaattcatttatttctttcgcatgcactgaaaaagagacacaaaagcccagctcctccaattttgtcttcgcggcatttatattttcatctgacataacggacatgcttgtggccggagacacaatacgaatgccgtcaccttttttcaatttttccggatacaaaaaaaccctccttaaatggtttaatctattacaccatattaacgagggtttatctatcattttttacaggtcgacccatttaatgccgcctgattgcgtatcattgtcaatccagacatcaaagtgatgcttttcataaaaatgaacgagtctgtcgacatgatcccaatcacgcttagcgatgtcgcctgtcactttcgggatattctgctctctggcgatatgttttaaaaatttcatgcagatcgagccgtagccatggttcggcgggcctttaatgtccccgatatgaatggcattgtcataataagaggcgatcagtgaaaaacagcctcttcccctgtaggctgattcacaatcagtcagcataatcttacatgtttggccatcatcaatcgaggaaacaatgatccaatcgtcattgttcgattgatcaataccaagcactcgcgcgtcttttgatacatctatcagattttcccgcattctgaaaatctgaaattcaagtttatgaagctctttttccagctctttctgatctctttcttctgcagtaaacaaaatcatactcctttcacagcgtaaaagtcttagttaaacacaagtatccattgtagtaaatgatgtcttggtttgtaaatgggttttgcaaaaacttttttagaaaagtctgccgtttatatgtggattgacgtttttaaggcggtgcggatagggaaaggaacagtgagcagcggaaaaaggaggaatctataatggcaattgactcactcatcggcaaattgaagtacgtaatgacggaatctcctgataaaatgctttccttatatgtaaatacggatatgagaaatccggatcagcaggggggagagtggaaaatcgccttgaaaaccggttttcggagattaaaagagtatctgtctgccagtgatccggaagaagaaaaatctctcgtccgcatcatggaacgtgtctatcaatatatcgatgagcttggtaaagagatgccgcgaagtctcgtattttttgcgtcgggagaaggcggtatttgggagacgattgaattgcaggtgcctgttgaaacacgattttattgggaagagacggctgtccttgatcaattagaacttcttcgtgaacaatttccgagcacggcttttattctcacccagcagaatgaagtgaagatcatagaaaccgtactcggaaaaattgaaggagtggagcattatcattacgacgtcatcaatgaatcgtggaaaccgcaggatgtaagcggaagcctctccgcgtcgatggacgaagacgctgccaaagcccacgtcgaagaaaaccaaaacaggctgtataaacgattggcttcaaaccttgatcaaaaggccgcttcacaccaatgggagcgtctcgtaatcgcaggggacaaagaaacagccgatattctcgatcagcatatgaataaaccgatagatcggatcattccaaaaaatctgttgaatgaaaacgaacataaggtgatagaagaactgttgaaggaagcataatttgacgaaaggccgggtctcaaacacccggtctttttagggcttaagtttgtctaatttctgacgaagcggacgaaaccgttgacatcaaagctgaattctcataccatttggatagtcagtaaaattgagagaggtcataagatgaatcagacagaaaacaaacctaaaagttataccggtatcgtgctgacattgaccgttctgatcaacgggttaattgcggtgctgttttttatgccgaaatcgggacaggtcagcattgccaatattcatattctgccgatgttaaatgccatttttaacagctttacttttatctttttgctggcagcgctctttatgattaagcaaaaaaatattcaagcgcataaacgttttattttggcggcgtttacgacgactctgctgtttttgatctgctatgtcgtataccactctgtggctgaaaatactttattcggcggccacggcatcatgcgcgggatttacttctttattttaattacgcacatctgtctttccgccgttatcgtgccgcttgcgctgtttacgctgatcagaggattcagcatgcaagtggagcgccacaaaaaaatcgcgagatggacgatgccgctctggctgtatgtcagtctgacgggtgtcattgtatacttaatgatctcaccgtattattaaaaaaagccgtgctctgcgcggcttttttctattgattgaaaaaggcgcctcatcagggcgccttttactcttcaagcgtttcaagtgttgttacatttaaggattgttcaacggtttttgtttttgcttttactttttctgcgtacgtgtaatcaccatagcagtagggataacggaaattgtctttgttccctccgcaagtgtaaagtttcggattctttttgacctgctgctcggagtattgttttgccagttcctcagtatgcgatcctccatgttcagccacaaaatcaatatagccggctcccatgttgtagctttgtataatcgtatccaagtctacgccttttttcttgcctgtttggtacatgagagtgaattgtttgattccctgtttgatactggtttgagggtttttaatctcatttcgctttaaacccagagattctgaagactgcatgggatcatttcctcttccttttgactcctgatatatcatgccgagtacaagcgatgtatatttggtgagtcctttttcatccagctcgtcttcaacaagcggtttgtaatctgtcagccgttcaaggacgatcggcttgacatcaaacggaagacttttgagccattcattatttgaaaataacagaatgaggaagaaggaaaccatgacaaaaacacatatcatcataagacccgcagcagcgaaacagccttttttctttttctccactgtgtttcaccctcaatttcaggagcattatgactttttcattatgacacagatgaatgcgcgaaaccaagcggaaacccgtatttgaaacataaatttaaaataacggttcttttgtcaggcgcaggatgtatctgcatcaattgacatttggtataattgggctacttgagaaaagaagggtgaggtatatgactgaatttcacgaatccggaaacaaaaatgaccccgctgtcgatttagatgaggaaactttatttttggttgcccagacttttaaggcgctgtctgatccgaccagaatcagaattctccatttgctgtcacagggtgagcacgcggtaaatgatatcgcagaaaagctgaatttgctgcagtctaccgtttctcatcagttgcgttttcttaaaaatctgcgcctcgtcaaatcacgcagagaaggaacatccatctattattctcctgaggatgaacatgtgttagatgtgcttcagcaaatgattcaccatacgcggcacgattaaaaaacatccctgctttttagacagggatgtcagccgtactgactgttattggtttggtctctgctcgtttttaaaacataaaaagagaagccgctgtaataaactgcgatgaaataaaagatactgatggtcagcggatcggccccgaccgtttggctgtatgcctccggatgggtaaagtccgctgtgacccggtaaatttcaataacgcgataaacaaatctcgataggaataacgttaatagaataagttcaatccacaggtgagtgcgaaaatatatttttccgcggcgttcttcaaaagaaatgttccgtttagcaaacaggaccagaagccagccgcaaaaagtgccgaatataagatggccgtataaagccgggtgtgtgatgctgaaaaacgccagagctgcggccagcaatgaaaacaaaatcattcttgtataaagccagcggggtttcaaaggctgaaagccgacggaccgtttcacctttttatacagaaaaaaggcaatcattaagacagggcagatgctttgaagtgtgatatgcatggtgtggaactccccctccgttgagtagtgtatgcttatccggctggttttagtagtgtgatttattcgcaggctgaaagcatcttttatcacattatgcacgtttcttttttttgcataagagaagcgcccgcgcctttttcaggatttaaacagaaaactcttgataaactaacggtattagttataataaaactaatgatattagtttttagggggatgttgatgagaatcttacaatacgaaaccgtttggcagctgactttttttcccgcgctcttcccggtgaattgttatttggttgaagaagaagaaggagtaaccctgattgacgccggactgcctaacagtcataaaggaatcaaacaagcattgcggcagcttgggaagccgctgaatgacatattactcacccacgcgcacggggatcacatcggttcgcttgactcattagctgcggaatttccggatgcttccgtctgtatttctgagcgggattctttcttgctgaaaggtgacacttcattatttgagcatgaagcacaaacgccgataaaggggggagtgccgaaaaatgttcgaaccgaacctgatcgcctgctgaaaggcggcgagcggatcggatctttacttgtcattcccgctcccggtcatacgccgggaagcctcgcttttaaagatatgagaaatgatatgctgatcgtcggagatgcctttcaagtacggggcggccttgctgtttctgggaagctgaaatggaaatttccgtttccggcttttgctacgtggaataaagaagaagctgtaaaaacagcaagaacacttatcgctcatcaaccaagcagtctggccgccggacatggaaatgttctctgcaatcccgttgaaatgatggctgaggctgttgaggaagccgaacgaagcctgccgggaggccgatcataatgtcaccgagagtcggaatgagccttgacatgatattgagagctgcagcaggcatcgctgacgaaaaagggctaaacgaagtgacgcttgcggctgttgcaaagtccttaaacgtaaaaccgccttccctttacaattttgtcaatggccttcaaggaattaaagcagagctggctgtctccggtttaactatgttatatgaaaaaatggcggcctctgcagaaggactgacgggcgaaacggctttgcttgctctcgccgatgcctatatcaatttcgccgaagccaatcccggattatatgacgcaacatttcaaaagataaaagatggccggattgagaatctgtcaagcctgcttgtagagcttgttgtcaggcagctgacagctaacggatatgcacagtctgacactgcgattcatgctgcgagaggactgaggagccttcttcacggatttgccgtgttgagaaaacagagtgcatttgaattaaccgaatcaattaaggaaagccgggagtttgcagttgttgcttttctaagaggtttgcaggagagggaacaataatattattatgtaaactaaataaaaagacgcatcatgtaaaaaggagggacaaatggattcattacaacatatcatttgtgagcggcgcacctattcacatatttttgattctcatgcacacacatactgccaaatgctctttccgctcgaaggacagctggacctggagacagaaagacgtaaaatcagattaaaacctgatcaaatgctgtatattccgcccgggcatgaacatcggttccgttctttggagcgaaatgaatgtctcgttctcgacataccggcatattttttcaaaggttcatttgcccccggcgttctgaataagcttgatcctttttggacttcgattcggtttctgctgacagaagagacaaagcagcagtcggctcattcattgagtctgcttgcagaatatattgctgaaaagatacaagaaaaccgtacaaatgattcaattgcgtatatccgccgaaatctctcaaagacttttacaattaaagagcttgccgcaatggaacattaccacccggcgtattattccgactggtttaaaaagcagacggggaaaagcccgcaagcttatattgctgagctccgtatgaagaaagcggaacaaatgcttattgaaacaaaatgccggctgacagacatcagtcaggaggtcggctttcaaaatttgtcttcctttaccagatggtttgtcagacataagggaataacgccgcgcgtcttccgaaacacctttcaatctgataaataatcctgaaaatcggttaaataaactgcttctttttttggtatcatgattgtaaaaaaggagtttttgatatggcagtcatcgaagattttatcaagcttgatcttagaataggaacggtcgtaaaagcggaagtattcccggaagcaaaggtgccggccattaagatgacaatagatttcggcgaagagatcggcatgaaacaatcaagcgcccagattacaaaacggtacgaaccgggtgatctgatgggcagacaggttacagctattgtcaactttccgccgcggcggatcgccggatttaagtcagaagttctcgttctcggcggcatcccggaaaaaggagacgttgtcctgcttacgccagagcagacagtaccgaacggaacgaaaatcggataataaaaaaagacgtttgcagaagcaaacgtcttttgcgtattgaggcgatacaccacacgccacattcgtgtgtgccgcaagggcatgtgcatcggcttacacaattcagctcatcgctatatcaatatagcatgccgggtgtggaaatgcaagagattttttaatatatgttatatctggctttgttttaccgatcccagattccttcgtgtaaggtttcatttgaaattttatgatcttgaataaagcagttcgacaaatgcaagagattcatctaatcttatatcctatggtaaaatttagacagaaagaagcagaaaggagccgtaaatgaaagtatttgaagcagcctcgttcatttcagccgcagaaaagcgggcaaaacaatacgatcagattagagaacaatttatcaatctcagaaaagcgtttcagggaatggctgacttagacgacagtgagttttcaggcaaaggcgcagacaacatcaaagcattctttcaagatcacgccggtgtcacagacagctggcttgatctgatcgatatgaagattgcgtttcttaacagtatttcaggaaaagtagctgatgccggattgggcgattcgtttgtggaagagtcctttttagaacacgagctgatccatgcgaagaatcaatcacaagccatcatgcaggagcagcgcaatgaaatgaaaggtatccttgatgaaatcagcgatatcattcatcttgatgttttctctacagaagatgtcgatcaaaagcttgagtcagcagataaaaaaaggaacgataccatacataaactcggaaagcttgatcacgatctaacgaaagaatacgcagaaaccgaggcaaatgaacatttcattcaggcagattttcaacagctccaaaacgctaggggaaaagggaaaaacgccactccgcttcactataacgccaaggcatacagggaaagtgacatacataagaaaaaaggcgagattgcaagacattcagacacatatttaacgtttaagaaggaagaagcaaaagagcgggaaatcaaggatctgaagaaaaagctcgctgacggtgtgaccgatccggatgaatatttggaaattgcaaataagatcggctatgaaaaccttgaaccttcccagcagcaatatgtcattcagcttgaacaagcaaaacagctggaagaagccggagaagtgacttgggatattttaaaaggagccggcatcggcctttatgatgtcgggaaagacacggttagcgggttatgggacttcataaccgatccgggagaaaccttgtcagcactggggaatgcagtacttcatccagtaaaaacatatgatgctgtttcagcagcaatcgaggaatcgtatcaaaaagatatggtgaacggagatgcttactccagatcaagatgggtgacatatgcaattggttcagcagctgtggctgtcgtcggaacgaaaggcgcaggagccgttaacaaagctgatgcggcggggaaagtcataaacaaggcaggacaggcagggaagaaaattaaagacgttaaacttccagaactgcttccttataactctaaatatgatcttgctctgtcgggtgacgtaccatacaatgtggttgacagccaaaaccttaaaaatgaacttttgaccaatgcaaagaaaatcccggatggaacgagaaagccgtttactggtcaagaaataaaccttccttggttaaataaagaaaagtatggtgctgttgaaatagacggcaaagtaaaagttaaaggacaaattagagatgtaagccgtagagtctataccttaaaggacattgatattaatcaaaaaactccaaaaggaaaaaccaacctggaattaatgaaagatggtaagtctccttatgctaaagacggaacacagattaacttacatcacctcatacaagaagaaagtggaccgttgcttgagatacctaatagtttacatacaaagtatagcgacgtaatacatggccttaaaggtaatggagaaagcttccggaatgatgtttacctggagaaacagtacaataactttaagacaaggtattggaagtggagagcaaaacaatatgagaaagaataaggggttataaaccatggatttttatttgaaagtaacagaattcatagctgataatgcaaaagaaaaagattttacgggtgggattggagaagatgaaattttaaaaattgagcaagatcttcaagtcacgctgccggatagctacaaatggtttcttagaaactatggttctggcggggtttatggaatcgatttattaggctatgattttggcggtgcttcagttgtagaaacaaccagggaatatcatgaatataggggattgccaagtggcttagtagtcatagaacatgttgatttttttgggtattgtttagataccaataaaatcaacagtgaaggagaatgtccagttgttatttggagtgaattcggtggctataaagaacttaattctgcccattttataaagttcttttatgaaagacttcatgagatgaaagaaaactgggaagaagatgaagactgggacgattaataaaagaaagctctcttttagagagcttttttcagattttcaatttttaacaggctttataatgagcaaacaggcattactcaaaatactcgccgcgcctatccaaagcagccattgtgttgcggtcagccatgaggcagttaggataaagagtccaatggcaattgatatataattgccggctcggtccagtttacggttgcaatgaattttatatttagcatgagaaataaattgatcaattttatctttcagctcatagcatttttccttcattttatcctctgtttcttttacttttcgataaagcatattattcatcgtctgcactcccatatcgccgttttgaaaattcagccatgattttttcttcatagtcatctgagatgaattgtgcctgatcttcaactttcaaatgtgctttttcttcaaaaccatcctgttcttcaccatcaaaacgataaagtttttgcaatagcctccagaatgtttcaatttcatcagttgtgaagtcatgaaacatatccgctaaaaaataggtggatttttctgaacaggaaattaacgctttttttccttcagcggtaatctcaatattgattgcacgtttatccagtttgcttggcacagtgtgaacatatccttttttcgcgaggcttgaaattaatttgttagcggtttgttttgttgtgcccagctttttagcgatattcataagtgtggtatcttccgtcggtaaatgggcaatagcaataagagtcatgtgctgtcgggaagtcaacatttctaagtattcgtccccccgagcctgcactttattgacaaccgaaaataatgatgcgtaactttgttgcataacatgcagttccttcattagtaatttaatatccataaggtatctcccatctgaattgtcaccatgttgacaattataatatacaacgaaacgggaaacaagtcaatatggtgactaatgggaggggttacggctgttttcaaaaatatcacaggcagtcggagtgtttacaaaaggggtaataaataaaagaatgcgaaaaggcattaatccaaagtgagaaggtgtttgacatgcagaaagtgaactggtcagaacagtatgaatggttcaataaacaagatgaaaaagacgggcgtttaatggcgctccttcgtcatgagcttacatatgaggaagtcatacggttatataagaaagggttttatttgaaatctaaagaaggggatgtttcgttacgtaagaacgatatccgtcgtatgtttggggttgaagagaggcagggcggcgaatcttaataaacgggaagagaaaaactcttcccgcttttcatggcagctgttattctttttccagcatggaagtcagccattctcttaatgcagttttctgtacataccgctttccgtttctcgtgatatgcggaacgtcagaggtgtcgggcacgatttgtttcgcttcttccttcgtaactcctaaataataaccgatatagaagtgcagatctttttctttaatgagaatgtggtcagtgtgttcatgaggatcaggtgatttaaagtttttcaatccgtctcctatgaaatatccggctaaagcgattccgataccggtatgatatccatacagcaagcctccaataaacgttatcactttttatacggtgaagccggctgaaaggattcagccttcatcaaaaccgcccggcgtttattgcggacggttttaattgctgagcttttccacctgcacctttccggagaagaaaacagcgcctccgcccatatccgccagccgatcgggcgtgagcgaattgacgagctgttttttatcatccatatcggcccaaagaccttggctgactgcaacgccgggaagcacctgttcgccgaccgaaactgtcaattcacactctccgcggtgattccaaactctaacggtttccccgtcttctatgttccggcgtacagcatcttctgtatgaataaaaagctttggcgctttttccagttttacgtgtttttcattattcgaaaatgtcgaatttaaaaaattatgattcggtcccgggacaaataaaagcggaaaatcgccatcgctctcaagagggatgtgtgtcggcagcgccggataaccgtcttgtttcatcttttcagaatataattcaatttttccgctcggtgtcttgagctgtcccggaaaaagcggttttttccgtttggctttcatgaaggaatggcgtgagagcgattcgtaatcaatatcctcgatatacggattgtcgggaaagtccagcgcctgtctgatcaattcttcatcggaatcctgaagctcctgctcggtaaatcccattgctccggcaagcaaacggaacacttccgtattcgatttgctgtccccgtagggttcgatcaccggtttttgcagctgaataaaatgatgccagtaagacgtgtaaaaatccgtgttttccaaagcggatgcagcagggagcacgatatccgcgtatttggcggtttccgttaaaaacagatcgtgaacgactgtaaataaatcctcccgcagcaggccttttctgactttattcgcttccggcgcaaccactgcgggattcgtaccgtaaataaacagggagcgcacgggcggttttgtttctaaaagaacgcttccgagcctgttcatattaaatgatcgtggcttcctgccgtaaagcagatcaggccgctggagcgcttgtctgttatagtttaataccgcgctgttgtgcttgattgcgcctcctccggtgttgagccactgtcctgtaacagccggaaggcaggcaacggtgcggacgatcattccgccattgtcatggtgctgaatgccgtttccgatcctgataagggaaggggaggtttccccgtacattctcgcaaggcgtctgatatcgtcggctttaacgcctgtaatagcagaaaccgtttccggatcatagtgtttaacatgcgcttttaattcgtcactgccttcggtgtattctgtgagaaatgcttcatcgtgaaggttttcgtcgaataagacatgcatgataccgagggcgagtgcggcatctgtgccggggcgaatgggaataaaccaatcggcaagccggccggtttggttcttatgtacatcgataacgacaattttagccccttttttccgggctttttgggcaatcatgacttggtgcatattcgtgctgacggcattgattccccaaaaaataaagagctttgcatgtatggtctcctccggatcagtacccgctccttctcccattgtatagttatagccttcagaaccggctttgctgcagatcgtccgttcgagatgactcgctccgagacgatggaaaaaacggcggtccattccctctgccgccagttttcccatatttccgtaaaagctgtacggaagaatgctttccgctccttcttcggcaataagctctttccagcgcgcactgatcgtattgatcgcttcctcccaggaaataggcgcaaacgcggcttcaccttttttaccgatccgttttaacggaacggttacgcgcttttcatcataaatgcgctcagccatgtgtctgactttgttgcaaatattccctgatgtgaccgggtgatcggggtctccctgaatgttaacgatttttccgtctttttttgtcacaagcaagccgcattgatcgggacagtctagtgagcataccgacttaaagaccccgttcggctgttttgcagcagaattcatagcccatttctcctctttgtttatattgtaagcattataacatttcaaaatcgaacgtcaattcagaaaaaaagtgttgacatcacggaaagacttttctatgatgagtttattcttttaaacagcctgacaatttcatcattttattttctatccagagaggcggagggactggccctacgaaacctcggcaacatttattgtgccaattccagcaagcgtatgcttgaaagataggaaagaatgatctatacatatttgtgcgcttcaagcgcataaagacggtatatgaatctctttccttctttggggaaagagatttttttatgaaaaaatttatgtgaaaaggatgttttgcaccatgacggttttaattaccgcaccatatcacgacgaggggctgaaggagctgactgagctgttcggccggactgtgcaccggccgtggaagaagcacggccgggcctatcgggaagatgaattgatccgaatgattcaagagacaaacgcgtcggggcttatcactgaacttgatgaggtgtctgagcgtgttattgacatattgcctgattccgcttttatcggtgtctgcagaggaatgccgtctaacgtgaatattgcggcggcgactaaaagaaaaatccccgttttctttacaccggcccgcaatgcccaggctgttgctgaaatgtttatcggaaatgtgatttcatttttgcgtcatacgtattcttcccatcagtggctgaaagacgggaagtggaatggtgattatttgcaggcttacgtcaaattcagaggaaatgagctgacggggaaaacagtcggccttatcggtttcggagccgtcggacagagaatcgcccggctattggccgcttttgactgcaaggtgctttactatgatccatttgtccgtcatgaaaaccgggagtatgaaaaaacgacgattgaacgggtattttctgaaagtgatattgtttccgttcacttgccgcgtacagaagaaaccatcggccttatcggcgcccggcactttcaattgatgaaacaggaagctgtttttgtcaatacgtcaagagcggtggttacagacagggaagagctgctgcgggtgctgaaagaacggcggattaagggagcgatccttgacgtgttttatcacgaaccgccagaatcttctgattatgaattgatctctttgcctaatgtattagcgactccccatttagcgggcgcaacatttgaagtggaagatcatcatgtgaagattttaaatgaagcgcttttcaaatggaaacaagatcaaacctgctcaatacgtgaactttataacaaaagagaacttgaaacggaaggaggaggctgtaatggctgaacaaaaaggctaccttgtatttgacatcgggacggggaatgcgcgagtcgcggtcgtgactgccggcggcgaagtgaccgcgcttgaaagggaagacattgaatatgtgacggatccgctttatccggacggacgatatttctcaccggaaagattatggacgcaaatcagcgctatggcaaggaaggttattgccaaaagcccacatattacattaatcggaatcacctccacaagccagaggcagggaattgttctgatcaataaaggtaaaaaggcatttctcggtctgcccaacattgataacagagggcgtgaatgggaagacgggattgaggcaatagaagaagtgcatcagcaaaccggacgtcttccgagcgctttattttccgccatgaaacttgtcggattaaaagctagacagccgtctttatggaaagaagtgaagtacatcacaagcatcagtgactgggtgacatttgagctgagcggtattttaagctatgaaccgtcacaggctgctgaaacactgctgtttgacgtaaggaaaaaggcgtggtcagagaaattatgcaacatcttcggtgtgccttctgccattcttccttcactcgtccgatctgggacggttgtcggaatgttaacgtttaagaaagcggcggttctcggcctttctgaaagagtgcctgtgattgcaggcgggggagacacacagcttgccatcaaaagtgcagatgcaaagccgggagatatcgtcatcgtatccggcacgacgacgccgattacaaagataacagcggagaccggaaccgaaagtttagagaatgcatggctgaattgccatacagaagaaggtcaatggcttcttgaaacgaatccgggtgtaacaggactcaattatcaaaaattaaaatccattttttatccgaatgaatcctacggcgttatggaacgggaaatcgcaagtctgccgaaacatgatcatgcttgtatttctgcgttaggctcctatttatcgcctgagaaaaacgcactggcaaaaggcggatttatttttgacgctccgctgtcccaaaacttaagcagagcccattttgtcaaagccgcactgctggaaatcgctttttcaatcaaatggaactatgaggcgttaacagaggtggcttccttttcacaagatgatgtgaaggtgtgcggcggcggtttccaaagtgatgctttgacgcagtttcttgctaaccttctccaaaagaaaatctataagagagaggggttcagccaggcatccgcaatgggagcggcgatgatttgcaacgaagctctcggtgtgaacgcagagctttcgagccgcacaaaggtaattgagccggaagcggatcagacggatctcttcctatatgaagaatggaaacatacgcaaaaattatttactcattttcagccggcggtgaaagcctgacttggggatgagatgacaacatgaaagattgctgaggaggaacaaaaatgcttaataaaataggaattccaaaacagctcgcatggggatttttgggagtcgtgctgtttatgatgggggacggccttgaacaaggctggctcagcccgtttttagttgaaaacggcttgacggtacagcaatcagcatccctgtttacagtttacggtatttctctcgctgtggcgtcttggttttcaggggtctgcctcgaagccttcggcgcaaagcggacgatgtttatggggctgttgttttacgttatcggaacagccgcatttatcgcatacggatttgaaaatcttaatttgccggtgatgtatgtcacgtattttattaaagggctgggttatccgctgtttgcctattcttttttgacatgggtgatttaccggtcgccgaaaaacaggctcagtacggcggtcggctggttctggattgcatattgctgcgggatgtttgtattcggtgcttggtattcaagctgggccatcaaatccttcggctatttgaatacactgtggagttcaattttctgggtctgcctcggcgcgttttttgctttgattttaaatagggaccgctttgaaaagaaaaaggcagataagcgggaaaaggcgcaggaattaatgaagggaatcaccatccttgctgaaaatccgcgcgtgctctctggggggatcattcggatcattaacagcatcggtacatacggatttccggtatttcttccgatgcatatggcgcagcacggcatttctacaaatgtatggcttcaaatttggggaacgatctttctcggaaatatcgtctttaacttaatcttcggcgcagtcggcgatgccttcggctggaaaaagactgtcatgtggttcgggggagtgggctgcggcatttttactcttttattatattatgctcctgttgtatcacatgggaacttgcttttcgtcagcattgtcggttttatatggggagggctcctcgccgggttcgttccgatcggggctatcgtgccgacggcggccggcagcgataaaggtgctgccatgtctgtgttaaatctggctgcgggcctgtcggcatttgtcggccctgcgcttgcctgggcgttcatcggacttgtcggcgcacaaggcgttgtatggattttcgcagcgctctatttcgtaagtgcaatcttgaccaatcaaatcaaaatacctgaagagaaaacggcaaaacacaataaagcattgcctgaatacgcttcttaacagcagcgccccgaaaattcggggcgtttttttacagctgctgaagaaacccggcaaagcgctgaatttgttcacgtaacgattgtttgttttcgtgaaattgtttgaaacgatgtccgtttgctccggacggatgcgggaagccttccagaatgaccgcatgacccattctgccgttcttcttcagcatgcggcaggctgattctgctgctttgccgagagggataagcagaatgtcctttttcatcatttctatttcatccggaaaacatgtcagcgcgtaacggctgagaagagctgacctgctgattgccggccgatgtcccgtatagtttttctgtttataaaaaacagggtgtttgataacggacgttgtatgaagaagctcccgttttgaatcaaataaccgggatgaatcctcaacgtgaagcgcggccggcagaccgcattcattaagcatttcgatgatgttctgcctcattgaaccggaaagtccggccgctttttttgtttcataggctatcgtttcaaaagtttcgccatcttttaaaagctgtgccgcttttttgtaagccagctgcatttgaaaaaaaccgggtgtgattccggaaatggcaacgactgcataagggttaatatattcattatgaggcgaataatacaaatccagatctccgtccttagctaaatggaaagccggagtcagcaaatccgattttgtaaaccctcccgaagaagatagtgctttaagctgctgcaaaaaatgcgcaagccgctcacgatcgcaaatcatgttatgcctccttggatccgcgccagtttctcttagtgtcatcaaaaacgtcggatgacatgcaggctcataaaccgcttttaccggcgttccagagcattttcagcacgtgaggcgttcctttaacttcggctgccgtcgtttgcacggctgtttttttagtaagaaagtcttcctgcagttctttctgcttttgtgataacaaacgggtttctgttttgatttcatcaacggacgtctgcatggacgctgtcgcggcgttaatcttctttatatcaggcgctgtgtttcttttaaaatggacggcggatacggctgcataaattaatgcggcagccgcaacggcagcactgatatacaaaatgatgatcatctgcttttcactcctttttttcagttgataccctttacggatcgtgttgaatcattttatttgctaattgttttttttctgcttataatgtgaaatcgtacataaggacattcagaaagggtgaaagacgtggaaagtttacaaaacaaaacggctcttatcacgggtgcgggcagaggaatcggccgcgccgccgctatcgctttagccaaagaaggagtcaatatcggtttaatcggccgcacagaagcaaatgtcgaaaaggttgcggaagaagtgaaagcccttggtgtaaaggcatcattcgctgctgccgatgtaaaaaaccaaaaagaggtagagcaagccgtctcctctattaaagaagaactcggtgagattgacatcttgattaacaatgctggaatcagcaaattcggcggatttttggatcttacgcctgaagagtgggaagacatcattcaagtgaatgtaatgggtgtataccacgtgacacgcgccgttctacctgaaatgattgagagaaaatcaggagatatcattaatatttcttctacggcgggccaaagaggcgccgcggcgacaagtgcgtacagcgcttctaaatttgccgttctcggtctgactgaatctctcatgcaggaagtcagaaaacacaatatccgtgtcagcgcaatgactccgagcacggttgccagcgacatgtctattgaattaaatctgacagacggcaatccggaaaaagtcatgcagcctgaggatcttgcagaatatatggttgctcaattgaaattacatccgcgcattttcatcaaaactgccggtttgtggtcaactaatccttaaacaaaaggggacctgtcttcgtgacgggtctttttttgtttccgcaacccgaataaatgggcataaagatccgtttttgcagaaaaaagagtgaaaaagaaaccgatatcagctataattaaactaaataaactatgtaccaaatgttcactaaaattatttttccccgcctccaaaaaacaaatcaatacaaaccaaactgtccgaacaataaaagggaaaacgggatataaagagaatatttagtacatggaataatttgttagaaggaagggtgtgcacatattgaaagaagaaaaaagaagttcaaccggttttttagtgaaacaaagagcttttttaaagctttacatgattacaatgacagagcaggaacggctttacggactgaagcttctcgaggtgctgcgttcggaatttaaacccatcggttttaagccgaatcataccgaggtgtaccgttcacttcacgaactattggatgacgggattttaaagcaagtaaaagtgaaaaaagagggagccaaactccaggaagtcgttctctatcaatttaaagactatgaagctgcgaagctttacaaaaaacagctgaagacagagcttgaccgctgcaaaaagctgatagaaaaagccatttcagataatttttaaatccggccggaacgcccccggcctcccgggctcaaaaggtttgttctgtgattcattatacataatagcaggctcggaacaatacatatcaataataccttcaaacttgacatcaactcctgaagtggtaacataaaaaacgtgtgaaaaatacgaacaaaatacgaacaagggagatgttaccgatcttagatcaaaagaaagttgcttttatcggagcaggatcaatggctgaaggaatgatatcaggcatggtccgcgcaaaaaaaattcccaaccaaaacatctgcgtgacaaaccgccgcaatacagagcgactcgctgaattggaacatcaatacggtattcagggcattgcttttgacagcatgaaaaccgaagatattgatgtctttattttagccatgaagccgaaggatgctgaaatcgctctggctgcgctgaaacggcgtattcaacctcatcaaatcatcctgtctgttctggcaggcataacaacctcatttatacaacagtcattacatgataatcagccggttgtaagagtgatgccgaacacatccagcatgatcggcgaatcggcaacagctgcggctttcggagaccatgtctcttacggttcagcaaaaaccgcggtatcccttttggaatgcctcggggaagtgtacgtgatcaaggaagatcagatggacattttcaccggcatcgcaggcagcggaccggcgtacttttattatttaatggagtttattgaaaaagcaggtgaagaagccggcttagacaaacggctgtcccgcaaaatcggcgcgcaaacgttattgggcgccgctaaaatgctgatggaaacgggtgaaaaaccggatgtgcttcgggaaaacatcacctctccaaacggcacgacggaagccggcctcgatgcgctcaggtcagaaggcggcggagaagccattgccaaagccatcaaacacgcgaccgaacgttctattgagatcagcaaaacaattgaaaaaacggcagcactataatcgttaaaaaacaggagtgatacagtgacgtctcggacgaagatcaaaagagtcgcggtgaaaatcggcagcagctcactgacgagcctgcacggggaaatcagcagaagaaagctggaagcattggtggatcaaatcgcacagctgaaagacagcggctatgaagtgattttagtatcttccggcgcagtggcggcaggttatcggaagctcggatttattcagaaaccggaaagcctccctgaaaaacaggcttctgcttccatcgggcagggattattaatggaggcttattcaaagctgtttttagcgcacggttatgtcgcatcacaaattttaattacaagaagcgacttttccgatgaatgccgctaccataatgtgcgcaatacgatgaacgtccttttggaacggggcattattccgattattaatgaaaatgacacggtcacagtcaaccggctgaaattcggagataacgatacactcgcagcgaaggtggcaggtttaattgatgccgacatgcttgtgattttatcagacattgacggtttatatgatgataatccgcgcagcaacccgaaagcgaaaagaatcagtcatgttagtgacatcactccggaaatagaagcaagcgcgggagatgccgggagtgaaatgggaaccggcggaatgcgttcgaaactggatgcttttaaaattgtgatggcctccggtattaaaggctttctcgggcaggctaacattccggacattctgcttcaagcggtagatgaggcggctgaaggaacttattttgaagcggaaggaaccctgccgttaaaccacaaagaacaatggcttgcatttaattccggccccgaaggcgaaattgtgatggaaaaagaaagcagccgcgatgtcgcgaacggaaatatggagctgtcaccgcaggacatcgagcagattaagggcagattcagcagcggagcggttgtcaggctgcttgatcagcagggagaagagctcggactcggcatcgtcaactattcctcagcccagctgaagacatttaaagaaacgccgcccaaacagaccgatcaatcagtcattgatccggaagcgtttgtctgccacgttgaactatccattccgatcggctgagaaagatctaaaaaaatatgaaaaagcccgaggcttcgttttgaagctcgggtttgttttttattgatattgttcaagtttggagaaaaattgaatgacaaaatgatagaaatcatttgcagacggagccagttcccttccttttggtttaataatgcctacggtgcgcttcacttgaggaaattcaatcggaattttgaccgtgaaccgaggggtggtttctccaaaggtgctttcaggtaataaagtaactcccatccccgcggagactaatcctttaatggcatctaaatcctcgccttccgtcgatacaagcggcgcaaagccggcctgtctgcaagcgtcaatcgccatgttacggagaataaacccttcaggaaataaaacaaattggtcgccgcgcagatcaattaaatgaatatttttctgtttggcaagcggatggtgcagcggaacaagcgcgtaaatcttttccgtgaataagatattgcctgttatgtcggggaattccgtcggaacggggccgagcagcgcagcatctatatccctgtttcttacggcttcaattaaaaacttatatgacccctggcggagcaaaaactcaacgttcgggtattcctctttaaacgccgaaatcaccgtcggcaaaagctggcttgcaaggctcgtcggaaatcctattttgacggttccgcgattcggatcaagatattcatcaatttgttctttcgcgtaatcaattgctttcatcgccgttttaatatgttctaaaaattgtttgccgatcggcgttaatttaatatttctgccttcccgttcaaataaagtgacttgcagctcttcttcaagatttgcaatctgcctgctgatggcggattgtgcgacatgcagatgatcagccgcttctgacacatgttcccgttctgctacctccataaaataccgaagctggcgtaattccattgcgttcacacctatctatctcattttgagatgtatttgatctaaattatatattgtttatattgttttgaaaacttacaattaatttaaagttgtcagattttatgaccgataattaacggaaactgatcgggggagaggaattatgacttacaatcaaatgccgaaagcacaaggtctctaccgtccggaatttgagcacgatgcatgcggaatcggcttgtatgcccatttaaaagggaaaccttcacatgacattgtcaaaaaaggactgaagatgctttgccagctggatcacagaggaggacagggcagtgatccgaatacgggtgacggcgccggcctgatggttcagatccctgatgctttttttaagaaagagtgcggagagatgagactgccggaaaaaggccgttacggggtaggaatggtctttttctcgcaaaatgaagaggaaagaaaaaagatcgaaaaacaggtgaatgcattcattgagcaggaaggacagatcgttctcggctggagaaccgtccctgtaaatgtcggaaaaatcggaacagtggcacaaaacacttgcccgtatgtgcgtcaagtattcatcggcgccgcaaacgatttgaaagacagccttgcttttgaacgcaaactgtatgtcatccggaagcaggcggaaaattggggcgttcaagaacagcttgatttttacttcgcaagcctgtcaagccagactattgtttataaaggtttgttaacgcctgagcaggttgacgcattttatttggatttgcaggatgaaaccttcgtatctgcattctcacttgtgcattcaaggttcagcacaaatacctttccaacctgggaacgtgctcatccgaaccgctatctgattcataacggagaaatcaatacgctccggggcaacatcaattggatgagagcgagggagcagcagttcgtttcagaaagcttcggagacgatcttcacaaagtgctgccgattttaaatgctgagggcagtgactcatccattcttgataatgcgtttgaatttttcgtgatggcagggcggaaaccggcacatacggcaatgatgctgattccggaaccatggacggaaaacactcacatgtctaaagcgaaacgggctttttatgaatatcacagctctttaatggagccgtgggacgggccgaccgccatttcgtttacggacggaaaacagatcggcgccatccttgaccgtaacggcctgcgtccggcacgttactatgtgacaaaagatgaccatattattttctcatctgaggtcggcgttattgaagtagagcaggagaacattcttcataaaaaacgtctggagcccggaaaaatgctgctcattgacttagaagaaggccggattatttcagatgaagaagtgaaaacagaaattgcaaatgaattcccttatcaaaaatggcttgaagaagaattggttcaagtgaatcctgacccggaaatccgggaagaggaacaattcgatgatcttctcgtccgtcaaaaagcgtttggctatacgtatgaagatattcagaaatatttaatccctgttattaaagaaggcaaggacccgctcggctctatgggaaatgattcgccgctcgccgttttatccgaccgcgcccaatcactgtttcattactttaaacagctgtttgcgcaagtcacaaacccgccgattgacgcgatccgcgagcagctggtaacttctacggtgacctggctcggagctgaaggtgatctgctgcatccgagtgaaagaaatgcacgccgcataaagctttatactcctgtattatcaaacgaacagttttatgcgctgaaaacacttgtgcatcctgacattaagagccagaacatccgcacgctgttttccgatgacctagaaaaaggcctgaaggatttgtttcagcaggcggaaaaagcgatcaaggaaggcgtatctctgttaattttatctgacagggcaatgagtaaagagttgacaccgattccgccgcttttggccgtcagtgcgctgcatcagcatttgatccgccaaggactgcgaacaaaagcaagcattatcgttgaatccggggaagcgcgtgaagttcatcactttgcggccctcatcgggtatggtgccgatgctgtcaatccgtatttgacttacgctacgtataagcaggaaatcgatgaaggccggcttgatattccgtatgaagaagctgtcagcaaatacggaaagagcgtaacagaaggcgtcgtgaaagtgatgtcaaaaatggggatttcaactgtgcaaagttacaggggcgcccaaatttttgaagcggtcggcatcggtgaagacgttatcgccaaatactttaccggtactgcatctcagcttggcggaatcgatatcgaaacgattgcgcaagaagcgaaacagcgccatcaagcggcgtacaaggatgattacagccaaactcttgagccgggaagtgaattccaatggcggaacgggggagagcaccacgctttcaatccgaaaaccatccataccctgcaatgggcgtgccgcaagaatgattacagcctgtttaagcagtattctcatgcagcggataaagaacgaatcggatttttacgcaatctgttcgccttcaaagaagaccgcaagcctttaaaattagaggaagttgaatcagctgcgtccatcgtgaaacgttttaaaacaggagcgatgtcattcggttcattaagcaaggaagcccatgaggctttagcgatagcgatgaacaggcttggcggaaaaagcaacagcggagaaggcggcgaggacccgaaacgtttcgttccggatgaaaatggcgacgacagaagaagtgcgattaaacagatcgcttccggccgtttcggcgtaaagagccattatctcgtcaatgcggatgaattgcagatcaaaatggcgcaaggggcgaagccgggagaaggcggtcagcttccgggcaacaaagtatatccttgggtcgcggatgtccgcggttctacaccaggtgtagggttgatctcaccgcctcctcaccatgatatttattcaattgaagacttggcgcagctgattcatgatttgaaaaatgcaaatcgaagcgcgagaatcagcgtcaagctcgtatcaaaagccggtgtcggcacgattgcggccggtgtggcaaaaggtactgcagatgtcatcgtcatcagcggctacgatggcggaacgggcgcgtcgccgaaaacaagtattaaacatacgggtcttccgtgggagcttggtcttgcagaagctcaccaaacgctgatgctgaacggtttacgggatcgcgtggtattggaaacggacggtaagctgatgacaggccgggatgtcgtaatggccgccttgctcggtgcggaggaattcggctttgctacagcaccgcttgtcgttctcggctgcgtcatgatgcgcgcctgccatttagatacatgtcctgtaggtgtcgcgacgcaaaacccggagcttcgcaaaaaattcatgggcgatcctgaccatatcgtaaattacatgctgtttgtcgcagaagaagtgcgtgaatatatggcgcagttaggctttaagacgcttgatgaaatgatcggacggacagacgttcttcatgtcagtgaacgtgcgaaagcgcattggaaagcgggccagcttgatttatccacactgctgtaccagcctgaaggcgtacgcactttccgtacggcgcaaaaccataaaatcgacgagtcgcttgatatgacggttattcttccggcggtgcaggctgcaattgaagccggtcaggaagcggaagctgaaatcaagatcaataatacaaatcgcgtagccggaaccgtgacgggaagtgaaatttctaaacgctacggagcggaaggcctgccggatgatacgatcagacttcattttaccggatcagccggacagagtttcggagcatttgtccctaaagggatgacgcttcatttgaacggggattcaaatgactacgtaggcaaagggctttcgggcggaaaaatcatcgtgaaagcgcctgatgccttcaattgtgaaacgcacgataacgttattatcgggaacgtcgcattttacggggcaacaagcggggaagcgtacattaacgggcgcgccggtgaacgttttgcagtccgtaacagcggagtcaatgtcgttgtagaaggtatcggagaccacggctgtgaatacatgacaggcggccgggttgtcgtcctcggcgaagtcggcaaaaacttcggggcgggaatgtcaggcggtatcgcatacgtcctgagtgatgattccaaagcatttaaacgcaaatgcaacatggaaatgatttcatttgaaaagctgacggatgaggcggagatcaaagaagtgcaagaaatggtcaaacggcatgcggcgctgacaaacagcaaaaaagccgcagatctcctggacaattgggaaaaagccgcagaaacctttatcaaagtcattccgaaaaactataaacaaatgctcctcagcatcgaagaacaaaaagcggcgggtttatcagaagaagacgcaattatgtatgcttttgaagccaatacaaaggtcctccaaacgcctgccaaagatcaaaaacaagcggtagtacagtaagaaaggggagaggaacatggggaaaccaactggattcatggaagaaaaacgagaaaaaccggctgagcgggaccctctcactcgcttaaaggattggaaagagtattcggctccgttttcagatgaagcgtcaaagcggcagggggcgcggtgtatggattgcggcacaccgttttgccaaatcggcgctgatatcaacggttttacctccggatgcccgatttataatctgataccggagtggaatgacctcgtctatcgggggcgctggaaagaagccttggagcgccttctgaaaacgaataactttcctgaattcacagggcgggtctgtcccgctccttgtgaaggatcttgtacgctggctatttcagatccggctgtttcaattaaaaacatcgagcggacgatcattgacaaaggttttgaaaatggatggattcagccgagaattccagcgaaacgcacaggtaaaaaagtcgctgtcgtcggttcaggcccggcaggtctggcaagcgctgatcagctgaatcaagccggtcattccgtaacagtctatgagcgtgccgacagagccggcggcctgctgatgtacggcattccgagcatgaagcttgagaaaaatgtcgtcgaacgccgtattaagcttttgacgcaggaaggtatagattttgtaacaaataccgaaatcggcgttgacataacggcagatgagctgaaagatcaatttgatgccgtcattttgtgcacaggcgcccaaaagcagcgcaatctgctgattgaaggccgggaagcaaaaggcgtccattatgcgatggactatttaacactggcgacgaaaagctatttagattccaacttcaaagacaaacaatttatagacgctaaagggaaagacgtcatcgtgatcggcggaggagacacaggagctgactgcgtggcaaccgcgctgcgccaaaaagcgcgcagcgtgcaccagttcgggaaacatcctaaacttcctcagacgcgcacgaacgacaatatgtggcctgaacagccgcacgtctttacccttgaatacgcctatgaagaagcgcaggcaaagttcggcaaagacccgagagaatattcaattcagacgacaaaaatggtggccgataagcggggccgcttacaagagattcacaccattcaaatggaaaaagtcagaaacgaattcggaaagtatgaatttcatgaactgcccggaacagaaaaagtctggcctgctcagctggtgttcatcgccatcggttttgaagggacagaacagccattattgaaacagttcggtgtcgattcggcaaatcataaaattcaggcggcatatggggattataaaacgaatgttgacggtgttttcgccgcaggggatgcgagaaggggccaaagcctgattgtatgggcgattaatgaaggccgggaagcagcgcgcgaagtcgacagttatttaatggggagcactgttttaccgtaaataaaggggtttatttataaaaccggctgggatcagccggtttttcgtattgaaatgaaacctccttcttcctgtattggtcatagaagggtaacgcggaagataacatatggaattttgttttacagagtggagagattgttttcttccggagactgagacgatttgcaagccttgagcagtcgatcacggtgctgctgacgggctctgtgtgtctgcagtcgatttgcaggcagattttaattgatgaagaaaaacatattgaatttcaagcggaaacgcttataaacaaataaggaaacggacgggtccgctcctcttttttagacatccaaacgaaagccgatattgccgaactgccgtccttcccgcattctgttaaaagcggcagctgcttcactgagagggtacatgcggtcgataatgggacggatgccgcagcggtttaccaattccagcatatccgcaaattcctcattgcttcccattgatgtaccgagaatatgaatctgcggaaaaaacagcgagcgaataggaaatccgagctgatcgcctgaactggcgccaaatgttacgatccggccattcggtttcataatgtcaagatagtgttgaaacaaggccgggcctacaccgtcaagtatgatatctgctttttcgccattcagcgcctcattccagtcaccgtagctgtcaatcgcccggtctgcaccgtatgacagtgcggtttgttttttgttttcactgcgggaggtgacgctgactgtcgctccgatagcttttgccattaataaggcgtatgttgccacgccgcttccgatacccggaaggataaggtgttcgcctttttttaattgtccttttgtaaataaggcgcgataagcggttaatgctgataacggcagcacgcccgcttcctcccaagtcaggtgttcgggttttaaaacggcattttcctcaggaacaatgacataagatgaaaatgttccgtcgctcggaccgcctaaaatatcagggacggctggtacgtcctcaacagtcttccaattcagcaccgggttgatgatgacttctgcatgcagtaaatgagaccggacgccgtgtcctatttcggttacgattcccgcgccgtctgaaccgagagtaaattcatggtttccggtttcgtggtttttcattaaaaacaaatcacgatggtttaatccggctgttttcagctttatttttacttcgccgtttcccggccttttgtcaggtgcctgcatgaaatcaaagccattttcgtgtatgataagggcattcatcattcttctctcctttatgattgatgagaaagattttacaggctgtatcagctgcagtaaataaatgaaaattgatagccggctatcaataaaaatcatagcaagaaggtgcccttacatggaaagcggagacttaaagatttttcaggctgtcgcccgcaaaggaagtatttcaaaggcggcagaaagcctgcattatgttcaatcaaatgtgacaaaccggattcagcagctggaacggcaattgcaaacacagcttttttaccgcacaaatcgggggatgacgctgacgcctgcaggtgaaaacttattgaaagacgcagacagaatccttcaattgctgcatgaggcgcaaaaaacggcgcaagaggcaggcgatccgaacggcccgcttcgaatcggttctcttgaaacggcggcagccgtccatctccctcaatttttcacagagtattgcagccgctacccgaaagtacagctgtctctgtcaaccggtgatacacataccttagtgcagcacgtcttacactatgagctggacggcgcttttgtttatggaccggtcgaatacgaagatcttgagcaagtcgctgtaattcaagaagaattggtcttggtttcaaataagcgggaaggcagtttgcaagacttgttgcgagatccgattctgtattttgccgcgggctgttcgcaccgccgcaaaataaagaacatactgaaagaagaagcagtacccgcacataaaatcattgaattcggtacgttggaagccattattggggcggtgcaggcggggatgggggtttcctttctgcctgcatcagccgtccgttattttcaaaacaggaaaaatctttttcttcatgagctccctgaacagtttcgggatatgaatatatcatttatctaccggagtgatttatttttgacatcggcgtttgaagaactgctgaatggattaaaaactttaccgaacggaagatgagaaaacagaacagctgtgtacgccaatttttttcgttctggtttttctcaaaagaaagcgggtatccgggctgagcttgatcagcgcgatgaaaaactcggctataaaatcagagaagcacaaatgaaaaaaatcccgtatattgctgttgtgggagatcgagagtgccgccatcaatctgtacatgtaaggcaatacgggcgggaagacacatttgaagagaatgtgagtgattttatttcccggatcataagagaggcaaaacaaaaaatagagatttaacaaaaacaacattgacatatcgtaaaatcacgatataataaagcgtatgaaacctattgatgtttttaaagcgttgtctaatgagtcacggcttgagattttacaatggctgaaagagccggaccgtcacttcgccccgcatgatggcattgatatgaatgagatcggagtgtgtgtcagccagatcaccgataagcttcagatgacacagtcaacggcgtctcaatatctttccatccttcagcgggcgggccttatccaaacaaaacggattggcaaatacacctattataaaagagatgaagaagcgataaaggcgatggccgattattttcagcgcgaaatgtagggctgaatcctttagaagagggattcagtttctttttccgactacacatcgacatattgcgatttgtttctgtttttcaactctttatatcgatatatcacaatatatctttatataaatcatcaatgaaggagtgtgtcaggtgcaaaatacctggaagatttacattttggcaattatcagttttttagtggggacgtctgaatatgtgatatcagggatgcttgataaaattgcaggttccttgggagttactgtggcagcggcagggcagctgattacgattttttcacttgtttatgcaatcggaacgcctgtcatgatggcccttacagcaaaactggacagaaggaagctcatgatctatgctctggggctgtttgttatcgggaatatcatttctttccttgtgcagggattcggcttatttgcgggagcgcgggtgatcatggcgcttggagcaggaactgtggtggtcaccgcgcttacgatcgcagcaaaaatcgctcccccgggaaaacaggcaagttctctcgcaaccgtcattatggggtttacggcggcgctcattatcggtgttccgatcggaagaaccgtgtctgaagcttttggctggaaggtggtttttgccggaattgcggcaatcggaatcattgccatgcttattatacgtttcgcgttgcctgagataaaaggagataaaccggtgccgctcattcagcaattttctcttttgaagaaacgaaaggtggctgtcgggctggccattacgtttttttggctcggaggctattcggttgcgtatacgtacctttctccgtatttactgaacgttactcatatcggaagcggaatactgagtacattgctgcttattttcggtgttgcaagtcttgccggttctaaagcaggcggtttcagcgcagacaaatggggggcgcgtatgacattaaccggcggaatggcgcttcatgctatcatgctcatgttattgccgtttgtcacacattctgctttcggagcggcggcagtgcttattttttggtccttcgccgcctggtcatctgggcctgctcagcagtatcatttggcaacgatggagcctgaatcatcgggtgtattacttggcctcaaccagtctgtcatgcagctggctatggcagccggagcgggcatcgggggcattgttgtcacccatctgtctcttgcgtcagtgacatggatcggatcagcgggtgttgtcatcgcgatgtgcggcgtgctttcgcttgcgtcattaacgtctgaaaaaacctcatctgaatacagtgcagaataaacaaaagcctcatttctcagcttgagaaacgaggctttttgtcttgtcatttttcacattttttcaagtttacgccgattgcggctccgtttcggcttgagtcggcaactccggtgaaggtgccgttttcacggtcgatcaggatgctttgcacattcccgatatcaaccgggctgctgccgaatttatgccccatttcgttcagttttgtgcgggcttcttccggcactcctttttcatatcgataggatgtcatgctgtttgtgtaaattctcggctcttcgaccgccgctttcagatccatgccgtactcaactttgttcaggatcgtttgcaggacggaagaaataatcgttgctccgccgggggagccgacagtcaggacaggttcgttatttttgaataaaatagtcggagtcatgctgctgagcggacgtttattcggctgcacttcatttgcaccgccaggcaccgcatcgaagtctgttaactcattattcaacacaacgccgtatccgggaaccataatgccggaaccgaacagctgttcaatcgttgtcgtataagatacgacattgccgaagcgatcagttaccgtgaagtgagtcgtttggccttcttgtttgtcagtcggctgctccacttgtttatagtttgcagaaccttcctgataggcccaagggtcgccggctttcggttttttattgactttatcaatatctatcagctgtctgcgggcattgatataatctggattcaagaggcctttgagagggacgttgacgaattctggatccccggcaaatgcggcgcggtcagcataagccaaatgcatcgtttctgcgagaagctgatatttttgccaagaacggatatcatattgagaaagcttaaaatcatccagaaggttcagcatttgcaacaggaaaacaccgcccgagcttggaggaggagcagttgcgatatgatagccctggtaatctccccagatcggttcgtcaatcgtcacattgaagtttttaatatctttttctgtcattgagccgccgaattcctgcactgtttccgcaagctttttggagaatgctccgtcatagaatgcttttgtgcctttgtacttaatagctgtaaatgttttggctaagtctttttggatgagtgtgtctccttctttcagaggttctccgtccggaagaaacacgtcttttgcagcagtgtgtgataatttgtctttataatctgagatggcatcagctaaaaccgaatcgatcggaaagccttttgaggcaagtttaatggaaggggtgatgagttgtttcatggagcgtgtgccccatttgtcgagcgctttttcaagtccttttaatgttcccggaacaccgactgcagtccctttcgtaacgcgttcggagaaagggatggctttgccgttttcgtcaaggaacatatccggtgttgcgcctgccggtgcgcgttctcggctgtcgataatggtggtgtctttcgtcttcgcatcataaaccatcataaatccgccgccgccgattcctgacatcataggttcagttacgtttaatgcgaattgaatggcaaccgcggcgtcaattgcattgccgccttttttcagcacgtcggcaccgatttgtgaagcgagagggtgggcggtggcaaccatgccgtctttgccgacatctacctgtttgtagtcgtcataggaaaacgggtgtttcttagcctgagcgtgataagggatgcttccggccgcgagcaacgtactgagcagaacgataaaacagagattcataaactttttctttttcatagtctgcctcctttgttttccgcttacaattatagagtaagtaaaatgtgctgttttcacaagtgacaaacggaatagtccggtgcgcaaaaagccggagtttctgtgtgaatgtaatcagtcgcaaataggctaaatgggaaaccggactgaaaaagctgtgaaacaagcataaagacaaaaaataagctacaatgaacaaaacagaattcactcacatgacatatgaaaggaacgtgagccatgtatttaacgatcaaagagacagcggagtttaccagtcttcctgaagaatatgtgcacaatcttgttttgacgaataaaataagggccgtccatgacggacagcaatatttaatcaacaaggaacaatttcaaacccatctcgagcagttggaaaaatacaaggaaatgattcaagagtttttaaatgagccgcttcctgaagacattgatgtaaaagatgaagactaggacacaatttcatattgtgtcttttttttgcatttttttcggttgctcacaaaaaaacggatgctcagatttcattttaaggccgttgttttcattttttaatgccttgagtctctatttgtttaaaagcttgtcaccggtctgaaaatgatgtttttgaggaatttgttgaaactgcgtatctgattcaccttatgtaacactatgtatattatgttacataagaccctttatcctttatcattcaacgggtttcggctataatagtaacataatgctcaatatgttactttaccaattataaggggttttttgatgcatatcgtacagccgatccgaagtttggagaagatccaggaagtcaaagagtatttaatgcaaaaaagtgatcgtgattattttttatttattttcggcatgaacagcgcactgcggatttcagatgttctgccgcttcgcgtgagggatgtcaggaacaaagatcatgtgtgggcaaccgaaagcaaaacgagaaagaaaagaaaaattctgatactggagtctttaaaggccgacatatacgcttatacaaaagacatgaaagaggatgactatttgtttaaatcgaaacggacgaataagcccatatcccggattcaggcatacagaatattaaaggaagcggctgccgcttgcgggttggaggaaatcgggacgcatacgcttagaaagacgttcgggtatcatttttatcagaggacaaaagacattgctgaactgcagaggattttgaatcattcttctccgtctattacaatgcgttatatcggaatagatgaagatacgacgagagccgcctataaagtgttcggagggctgtagacttgaaaaaaacggccgccagcgttactataatagaagcaggctctagtagcacagcggatagtgcagcagtttcctaaactgcaggtcgggagttcgaatctctcctagagcgttttttgtataagataggcgcagattaataatgtcggtaaaacaaaaacccccttgttatacaagggggttttgagttggatattttgtgaaaacctgatggaaatgatgtgaaaaaagcccgctgtaagcaagcgggctttttcttatatgacagcatcaaattgattgactttccaaacgttgttttcttttacgaatgttacatcgcgttttgctgacggagaaccgtcaagagtcggtacagtgaagcggtatgtttggacgcttccttttttagaaagaagggtcatttttgcttttttccaattcaggaggttatctccgtcgccgaccggaacagccaatttgccgtcttttacagtgaagtggtaatctttgagccctttgtcaatcgcttgctttgtaaaagcgggtgtcagatattttacggctttcgcttttgttccgaggtctttgcacataaatacatattgcagattttgatattcaaacggttcagatgtgcaatttgcgtttgatgtaagcgcaccgccgctcattgtattccagaaatgttctctcgctgacagggccagctgaagtgcttgtttttgtgtaaggtcattaggtgcattttttgcggtcgcagcagtgcccaatgatagaatcaatgtaatagtagtgaggaataatagccattttttcatgatataatctctccttcaatcaatctctttctcttatgttacaaatgttacaataattacggtaagattacaataccttttcagaaatattttccgaactttttatttttatggtttatttccatgtaagacgtgagaaaaagataaagagtttcattgaacaaaaggtttttacaagctgtctgctgaataataaaatggaagaaaatcaaaaaaggagtcctacatatggaagtacaagatcatttagaaacagcggaaggccgcggccagtcagtctggcgatcgatgtcactgtttttagtgccgctgcttttaagcaatgtattgcaatctgtcggccaattggtcggaatggtatttgtcggaaggtggctcggagtcgatgcgcttgccgctgtatcgtctttttttccgctgttttttctgctgatctcctttacgatcggaatcggttcgggaagttccattctgatcgggcaggcttacggcgcgaaaaacgaagagaggatgaaggcgattgtcggcactacactgacttttacctttatgctcggtgttgtcctggcagttgtcggcagtgtgtttacgcttgatattctgcggctgatgggaacgccggaaaacgtaatagatgtcagtgtccgatatgcgcgcattttgttttgcgcaatgccgctgatgtttttatattttgcgtatacgacatttttacgcggaacgggagattcaaagactccgttttatacgttaatcgtcagtacagtcataaacatcgggctcttgcccttattgattctcgggcttttcggacttccgaagttcggcatttacggttcggcgtatgcaaccgtgatttcaaacatcgtgacatttatcgtactcatggtttatttgcggaaaaggaaacatccattggcatttgaccgggctgcgctccgttctcttaaaatggacaaaaagctgctcgcgcttttactccgtctcggtattccgtcgagcatcaatatgattctcgtgtcactttctgaaattgcggtcatttcatttgtcaatcattacggatcaaacgcgacggctgcttacggggtcgtcaaccaagtggcgagttatgtgcagatgccggcggtaagcctcggtatcgccgtttccatttttgccgcccaatccattggcgccaatcaattcggccggctgaaacaggtcatcaaagtcggcatcggcctgaattatttgatcggcggggttttgattgtgctgatttacaccttctcccggcagatacttgctttgtttttaacagatcaggatacactccacattgcccgcaatctgattatgattaccctttggagctatttgattttcggtcacgctcagatcgtttcagcgacaatgcgggcgagcggtacggtgttatggccgacgattatcagtatttttgcgatttggggaattgaagtgcctgtggcctttattctttctcattatacgaatctcggcattctcggcatttgggtcggttatccggcggcttttgtcgtcagcctgctgctgcaatacggatattaccggtttgtatggaagaaaaaacagattacccggctgattcaataaggttttaccgcacatcgctcagttcatacgggcgatgtttttttttagagaaggaaaatgagtttagaaaatggaattcctatacatgctagaaaacaaggaaagggcaggtgcttatgacgattgaacatacgacttatttaggggcttcagccataaaagcggagactgatcaggctgaatgcatcattgtgccggagtggggatcaaatgtcatatcgcttcgggataaaagaaccggtatgcggcttctgagagaaccggaaactgcggagcaattccgcaaaaaaccgatgctgtacggcatgcccgttttattcccgccgaaccggattacggatgggacgtttcgttttgacggccgcgcgtatcaatttgagataaacgaagaggataaacataatcatattcacggctttcttcacaatcagcattggaaagcgacggcagcgaaagaagagggggatggaatgaaagtcgaaacagaaattgatctttcaaagattccccgtgttcataaacaatttccgcacgatgtcattgtccggatgacctatacattaaaagacaatgtgtttacgcagcgggcgctgattatgaataagggaacggaggcttttccttgggggctcggctatcattcaacttttgttttcaatgaagagcgatcccgtctatttttgacggctgaccgcatgtgggaattaaatgaacgtttcgtgccgacgggccgtttattggatgttcctgataaagaagcgttccgtcatgggatgtctttgaaaaataaacagtttgacgatgtttttctttcttccggacggaatggcggcaataatgaagctgttatttatcatccggatgagcaattatccgttttgtatcaagcagacacgtctttcaagcattgggtggtatataacggtgacggaaagcaagggtttgtcagtcttgagccttatacttccgttacagatgcatttaatctgaatcagcctgcatcactgacagggcttcagattctgaaaccgggcgaagaagcggctgcgtcatccaggatcaccattttgcatgacgaagaataggaaagaggcgggataacattgaaaacatatgtgaaacgcttgagcgcggtgattctgcttttggtcattgccgcagttccttatattgatgaggcggctaaggcggctgaacaaaaaaatactttgcaaaaagagctggaacacattctggatgaagaacctgctttaaagggagtttcagcgggcgtcagtgtccggtcagcaaaaacaggggaggtgctgttcggcagccgggaagatatgcggctgaggcctgcatcactgatgaagctgctgacggcatctgcggcgctttccgttctcggagaagattacacctttaagacagaagtacgggcagacggcgccgtgaaaggaaaacagctgcgcggaaacctttatctcaggggaaaaggcgatccgaccctattggcttctgattttgagaagatggctaaacaggtcaaagccagaggcatccatgtcattaaaggagatctgatcggggatgattcgtggtatgacgataccaggtattcagttgatcttccgtggagtgatgaaggccaatattatggcgcgcaagtatcagctcttaccgcttccccaaatgaggattatgataccggaacggtgattgcggaaatcagcccggcaaaacagcccggtaaaaagccgcgcatttcgatttccccccatacggacgtcgttcgtgtgaaaaatgaagtgaaaaccgtcgcttctgatgaagcgaaagaattgacggttgaacgggagcacggcggcaatgtgattacgataaagggaaccatacctgccggctcggcaaaggcaagagaatgggcggcggtgtgggatccgtcgtcctatgctttagatttatggaaacaagcgcttactaaacagggtataactgtaaaagggaaaatcagaacagggcgaatgccgcaccgcacccagctcgtcacatcacggacatccatgcctctttcagaattattgatcccgtttatgaaactgagcaacaacgggcacgccgaaattctgatcaaggaaatgggaaaagtgaaaaaaggggagggcagctgggaaaagggcttggacgtgatgaaatcggagctcaaatcgttcgggctcaatccggataaattgattgcaagagacggatccggcgtttctcatattaacggcgtatccgccggtcaaatcggagagcttttgtatgcggttcagaaagaaaagtggtacccggctttccttcgttcgctccctgtcgccggtgcaagcgacagaatgacgggaggcactcttcggcaccggctgaagaatactccggcagagggcaaaattaaagcgaaaaccgggtcactaacatcagtcagttcgattgccggctatgcagacacaaaaacaggagatacgcttattttttccgtgcttcaaaacgggctgcttgacgaagatgacggaaaagacattgaagacaaaatcgcagtcgtgctggcaaatcaataagaagggccgaatccttagaggattcggctttttttgatgtctgtaaaacattatattgcgattatgaatcaatcttttcaaaaagtaatatcggcaatatccttccttttttttacataccgctttcttacatgttcaccgattattcattttttaacataaaacttcttttcgggaggaaaacctttttaaaagcacaattaattatacattttattccttattatagtgtttaagaaccagtttacagtatgcatacataccgttttacatggtataaagattatagaaatgaagaagtgaagtgaggaatatatactatattctaaaaaatgttagagaaaatttaattttttattgtgatttctaaaatatgttttaaaataatgcttatatggatgattaagtcatatgctgtcgaaatttaattgtaattatttcactttcttatcctcttaaattgaagcggagggattccattggagaacactgtttattctttaactcacgcacaaagaagagtgtggtttacggagctgctcgaaccgggcacaagtatctgcaatctcgcggcatgcgtcaaattcaggggggacatcgattttgacgtactgcgccatgctttagatttttctatctcgcaaaatgattcgctcaggtttcaactgacagaaggggacggatcagaaccccagctgtatcttgcggggcatcggccgatttctctagagactgttgattttactcatactgatcaggcagagcgggacgcatggattgacacgcagacccgtgttccgttcaagctgtttcattcacctctgtatcaatttactctgcttgtcatgtcagacgaagaagtttggctttattcaaaatttcaccatattatcatggacggcatctcgctcaacctgctcggcaaccagctcattgatatctaccaaaagatcatgcggagcgaggatttaactgaacaccacagaccttcctatctcagctacatggaaaaagaacagcaatacttacagtcttcccgttttcaaaaagaccgttcattttggactgaaacataccgaaccgttccggaacacctttcactggcggaacgaacctctcatcttagacaaagcactgcggcttccagagatacaatcactctttctcactccttagaacaatcaatccggcttttttgcaaagaaaataatatcagcatcatctctctgtttatggcttcgttatacatatgcatcagccgtctgacggctaaaaaggatattgccatcggcacttattacggaaaccggggctccaggctcgaaaaggatatgctcggcatgttcgtcagcacactgccgatcagaatgacggcagatcctgatgcagagttcctgtcctttgtccgcagcgtaggaaaagagcagctgtctgttatgcggcaccagaaatatccttacaatctttttgtgaatgaattaaggcagactcatcatgacctgcaaaatatcatcggtatttcgatgcagtatcagccgcttgagtggcgtaaggcagacggtttcgattatgaaacggccatgtttttcagcggacataccgcaaacgagctctccattttaattaaggagcggacagatacgggattgattgagctgaattttgattaccaatccgctttatttactgaaacatcaattaaacgcattcaaactcatttgctgacgatcgttgaaaatgccgttagaaatccagaccggctgattcggcatattgatatggcggatgaaaaagaaaagaaacgggtgttatcttcgtttaaccgtacagaagcggttgaaccgccggctccgacgcttcacgggctgttcacccgccgtgccgcgctttcgccgcatcgtccggcgcttcgttttccgggcggtatgctgacgtacgccgagcttgaccagtacacagacagactcgctgtttggctccgacaaaaaggcgtccgcaaagaaagcatggtcggcgtgctcgctgaacgctcgccggagatggtggtttcagtgcttgccgtgttaaaagcgggcggcgcctacgtgccgcttgacccggagtatcctgaggacaggctgcgctatatgctcgatgactgcggcgcctgtctcctgcttgcacagccgggattatccgtttccggtttttccggagaaacgctagaagtgtctctttctgctctgacaggcgagacggagacaggggctgtctctgaagaagcggatagcgattcgctcgcttatatcatttatacgtccggttcgacgggaacaccgaagggagtggctgttgaacaccgtcaggccgccgcctttttatcagggatgcaagggcagttcccgttaacggaagaggatattatcgtgctgaaatcatccttttctttcgacgcttccatctggcaattgttttggtggacgatgtccggcgcctccgtgtatctgcttcctgccggctgggagaaagatcctgtgcggatgattgaagcgtttgcctcagaaaaggtgacgaccgcgcattttattccggcgatggtcaacagctttttagacgcgctggaaacagagcctgcggaaacaagaacacgcctcggcagaaccttgacacgcgtgtttgccggaggggaagctctttcaccgcttacggctgcccggtttgccgatcttctgccggagaccgtgctcattcacggctatgggccgacggaagcgacggttgatgcggcgttttacgtctgtgaccgaaaacgggacagcggacggacgcggcttccgatcggaaaacccgttcctggtgcccgtctgtatgtattagatagcggaggaaccatccagcctgcgggcgtggcaggagagctgtacatcgcggggacaggggtggcccggggctatctgaaccggtccgagctgacggaggagcgttttctcgatgatccgttttatccgggagagcgcatgtatcagacgggcgatatcgcacgctggacagaagacggcctagtcgaatggctcggacgttcagacggacaagtgaaagtccgcggctaccggattgaaccgggagaaatcgaagcggcgatccggcgcatcgacggcattcgtgaggcggcggtcaccgcccggaccgaacacggcgaaaccgcgctttacgcctatatcgaaggacgggaaagtgatgatgtgcgggcggagcttgcgacacgccttccggcctacatgatgccggctcagtttatagagatgagcgaatggccggtcacgccgagcggaaaacttgaccgccgcgcgctgccggctcccggcggagcggcagacagacaggcgtacaacgccccgcggaacgtcacggaaatgaagctttgcgccctttgggaagaggtgctgaaaaacggccccgtcggcatccgggatcacttttttgagcggggcggccattcgttaaaagcgacggctctcgtctcccgcatcgccaaagagttcggtgttcaggtgccgttacaagacatcttcgcccggccgacggtggaagagctcgcttcggttattcaggacttggaagaaagcccgtatgaagcgattcagcctgcgcaaacacaggacacctatccggtgtcttcggcgcagaaacggatgtatgtgctccagcagcttgaagacggcggtgtcggctacaatatgccggctgtgctggaactgacgggcccgcttgaccgcggccggctggaggagacgttccggcagcttgtggagcggcatgagtcgctcagaacgtcctttgaaacggggcctgacggcgaaccggtgcagcgcatccatgacagcgtaccgtttcagctggatgaggccgagtcagctgacgcattcgtccggccgttttgtctggaggaagcgccgctcttccgtgcggccctcgtgaaagaatcggacgaacgtcatcttttattaacggatatgcatcatattatttctgacggtgtgtccgtcaacaccttgattaaagaattcggcgagctgtacgcaggccgttcgcttgcgccgatgcgccttcaatataaagactatgccgtctggcagcgatcgtttcaggagaaagaaggatatcagaagcaggaagcctattggctgaagcggcttgaaggagagcttccggtgcttgagcttccggctgacaagccccgtccggctgtcagaagctttgcgggcggcagcgtatcgtgcgcgcttgacgctgaaacggcatccggccttcaccgcattgcccgggatcacggctccactttgtatatggtgcttctcgccgcgtacaatacgttactcgcgagattgagcgggcaggaagacatcatcgtcggctcgccgattgccgggcgtccgcacaaagaccttgaaccgattctcggcatgttcgtcaacacgctggccatcagaacggagccgaaaggagacaaacggtttaccgattacttggcggaagtccgccaggccgcgcttgaagcgtatgagcatcaggactacccgtttgaagagcttgtggagcggctcggcgtgcagcgggacacaagccgaaatccgctgtttgatgtgatgtttgtgctccaaaatatggagcgtgaatccctggtgttaaataagctgcatttggctcaagctgcggatacaagtcataaaaccgcaaagtttgatgccacgctttacgcgtcagaagggtctgacggttccatcagctttgattttgaattcaatacagatatctatcaaaaacagacaattgaaaaatggctttcttattttacccgtattcttacaaaagtaattgaaaaccaagcgataccgcttggtgacattcacgtactggatgatgctgaaacaaatcgcgtcatttatcagtttaatcagacgaaaagcgattacccaagacacgaaaccatcagccgtttatttgagcgtcaggcaaaagaaacccccgatgcccgggcagttgtatatgatggacaaatcttgacataccgtgagctgaacgaacgggctaacagaatagcggcggctctccgatcaaatggcgtcggtccggaaagcgttgtcgcattattaaccggccgcacaacagagcttgcttccggaatcctcggaatattaaaagcggggggcgcctacttgcctatcggtgacgatgtgccgcgggaacgggctgaatggatgcttaaagactgtaaagctgatattcttctccaatctggtaaacttgacggtctgccgctttcaggaaaacgtttattcatagaggatattcaaacaaaggccggattgagttcggaaaatcccgaaccgctcggaggacctgattcattggcctacatgatttatacgtccgggtcaacaggtgcgccaaaaggcgtcatgattgaacagcgaagcgtgatccgccttgtgaaaaacagcaattatattgattttacgccggaagatagactgttgtttacttcatcattaggatttgatgttacgacatttgaaatattcggtccgcttttaaacggcgcttctttatatgtaagtgaccaggaaacctatctcgactcggatgttctggaaacatttatacagcaaaacggcattacgacactgtggctgacatcgtctctgttcaaccatttatcagaacaaaatgaacacgtgttttccggattatcccgattgattatcggcggggaagcactgtccccgagccatgtaaaccgggttcggaatgcgctgccgcatctctcagtatggaatggatacggaccgactgaaaacacgacgttctcgacttgctttttgattgaacaattatacgatcattcaatcccgatcggccgccctgtcggaaattcaaccgcatatatcataaacagcaggggaacaccgcagccgatcggcgtcatcggcgaattatgcacaggcggagacggtgtggcaagaggatatttcggccgccctgagctgacggaagaaaaatttgtccccaatccttttgttcccggagaacggatgtaccgcaccggagatttagcccgctggctgccggacggaacgatcgaatatgccgggcggatggatgatcaagtgaaaatccgcggttatcgggtcgagctgggagagattgaagctgcactgaggggcctggacggtgtgaaagaagctgccgtgtcagtcagaaccgggcagtccggcaataaagaactgatcgcatatatgagtctgcaggcggacatggatacagaaaaagtgcgttcttcactgtctaagcaactgccgaattacatggttccggcctatatgatggaacttgagaagctgccgcttacgccgaacggtaaattggatcggaaaaatctgcccgaaccggagctcgcgcttcaaaccgcgtacacagctccccgcaatgagcttgaagaacagctttccgtgatctggcaggaagtgctcggcacaaaacaagtcgggattgaggactcattttttgaattgggcggcgactcaatcaaagcgctgcaagtttccgcacggctcggacgctatgggtggaaaatgacggcgagtgacttattccggcatccgtccattaaggagctcgcgcctcttatccggaaagcggaaagagttatcgatcagcggccggtggaaggaaacattccttggacacccgttcagcactggtttttatcacagcggatggaaaacagaaatcatttcaatcagtccgtcatgatgttcagctctgacgcattgcataaacagccgctcaaagaagccttggagcatcttgtcattcatcatgatgcactccggatcaccgtcagtgcagaaaacgaaagtttcagacaaatcaatcacggtattcaaaaagatgaactgtacagcttggacatttgggatctgtctgagacagatacttgggaaaaagaaatagaaagtgaagtcgctgcgctccaacagcggatggatattgaaaaaggcccgttattaaaagccggctggttcaaaacccggtccggggattatttattcatcaccgtacatcacctggcggttgacggagtgtcatggcgtattttgctggaggatttatctgccgcttacactcaagccgtaaaaggtcagccggtccagcttccgccaaagaccgattcgtttaagcaatacgctgaaaggctttcagaatacgcaaaaagcagcaagctgatgcgtgaagaagaatattggcgttttattgaagaagaaacagccgccgaacttccttatgaaaaaccgcagcatcagacgggagtcgacagcattcggcaaacggtaagctttacgcttacagaagaagaaacgtccgttttgcttcagcaggtcaaccgggcctaccataccgatacgcaagatattcttctgactgccgcagctttggctttacgggactggacagggggcggcagactgcgcatcgcgatggaagggcacgggagagagcacatcatgccggagctcgacatcagccgcaccgtaggctggtttacctccatgtatccggtgctcattgacttgaacacagcaggcgctgagcttggaacggcggtaaaaacggtcaaagacacactcggaagaataccggataaaggaataggctacggcattttaaaatacatgacaccgcctgaacaaaaaacaatccgcttcagacaagcgcctgaaatcagctttaactatttagggcaattcaatgatacagaagatcagcacacgttcagtctgtccggtcttgcaagcgggcacgacatcacgccgacatggcagcgggaacaagcggtggaaatgagcgcgatggccgcacaaaacaaacttcacttcagtttgagctatccgccgagccgcttccgcaaagaaacgatggaacagctgctgcaaactttacagcaatatttgcgtgatattatggcgcactgcaccggcaaagaggaagcagaaaaaaccgttagtgattttagcagcaaaacgttaacatctgatgatttggacagcatagcgagttttgtcgaggaactgtagaaaaaggcgacggggagattataacatgacaaaaaagaatgcaattcaggatatttatccgctgtcttatatgcaggaaggaatgctttttcattccctcctgcaaaaggaatcacaggcttacgccgagcaggcctccttttcaataacggggaaggttgacacccgcgtgtttgaagagagcgttcatgcccttttcgaaagacatgatattttcagaacgatctttatcagccagaacgtgtcagtgccgcagcaggtcgtattaaaagagcggaacgtcagcatcattgaggaaaatctcaccaatttaaacaaggctgatcaaatcaagcatattgaagaagccaaacgaagagaccgtaagaaaggatttcatctgcaaaaagacatgctgatgcgggtgacgctgcttcaaaccggtgaatgtgaatatacgtgcatatggagtttccatcacatcattatggatggctggtgtctcggaatcgtgctgaaagagttcttccagatatacgcctcgcggctccgccggacaccgttaacgcttgagcccgctgtgccgtacgggacctacatcaagtggctgatggagcaagataaagaaaaagccgcttcgtactgggagcggtaccttgaaggctttgagcagcagactgttctgccgaagcagaaaaaagccggcgaaagcagacaagaggaaatgacgttttccttttcaaaagaggacacggctaagctgaaagagctggccgtaaaagaagaggtcacgctgagcaccattttccacacgctctggggcattttgcttcaggcgtataaccagacagaagatgcggtttttggttctgtcatttccggaaggccgtctgaaatcgaaggcatcgagcgaatgatcggcctgtttattaataccgtgcctgtccggatcagcggggcaaacatcccgtttcaaaagctgatcaaaaacgtgcaaaaggacgctttgaaaggacaggcttacagctatcacccgctttatgacatacaggcgaattcacaggtaaaacaaggcttaattgatcatattcttgtctttgagaattatccggttgaacaggagcttgatgtgctgaacagcaagggggacacgaaagacctttttcacatccatgatttcagcatggaagacgaaaccaactacagtttttacctgatggtggcgccgggtgacgaaattcatttgaaaatgagatacgattcaagcatgtatgaccgccaatttattgaaaatatcaaaggccatttggcgcatatcgtctcccaagttctcgacaaaccggacatcacgccggacaagcttgcaatcatcactccaggggaaaaagcgcagctgcttgcgccgatttctgaagagaccgaaaagcctgaatatgacacggttcatgcaatgtttgaacggcaggccgcaaaaacgccggatcaaatcgcgattcggtatgaaggcgagtcagtgacgtacaaagagctgaacgaatcggctaataagctggcccgcctgctgcaaaagcgcggattaaagcgggaggaaccggtaggcgtcatgctcggccgttccccttctttagcggcggctgttctcggtattttaaaagcgggcggcgcctttgtcccgatagatccgggcagtccaaaggagcgtatccgatatgtcattgaaaacagcggctgcgtccatgttgtaacagagcggcatcagtcagtccccgcggaacaaacgctgcaagttacatacatagaagacgccgggacggaagcggacggaagcaatgtgcaatccattaatacggcagacgacctcctttatatgatttatacatcgggaacgacagggaaaccgaagggtgtgctgctcgaacataaaaatatggccaacctgctttctcaccaattgacgaacacagacattgatttttgcacaaatgtgctgcagtacgcatctgtggcgtttgacgtctgctatcaggagttattttcagtactcttgagcggcggcaccctttgtatcgtgcccgaatcaatcaaacgagacgtttctcagctgttttcgtttattgatcagcacaacacggaagttgtgtttttcccgactgcgtttgtcaaaatgcttttcaatgaagaaggttatgcacagtcttttccccgctgtgtgaagcatgtcattacggccggggagcagctgaccgtttcgcgtttgttcaggcagacgctccgtttacacggtatgcatctgcataatcattacggcccgtcagaaactcatgtggtttcaacgtatacgatttctgcgggagatgacatacctgaacatccgccgatcgggaaaccgatccatcataacaaaatgtatattctcagcaaaaacagacagcttcagcctctcggaattgcgggagaattgtatatttccggggcgaatacaggaagaggctatgtgaacaatccggcgctgaccgaagagaaatttttgccggatccgttcagaacggacgccgtcatgtaccggaccggagatttggcaagactgcgtgcggacggccaaattgaatacatcggccggacagatgatcaagtgaagatcagagggtaccggattgaaccgaaggaaattgaaaccgtcctggcaaatcatcatgccgtgaaagaagctgctgttctgattcaaacgaatgagtcgggcgaaaatgaattatgcgcctactgcagcgtctcacaagcgactgatccttctcagctgcgaagtgatttggctaaagagctgcctgattatatgattccggtcaaatgggctttcgttgactcgattccgctcactgcgaacggaaaagtcgatcagcgggcccttccggaagcttcggcgtacaccgcagtccgtcgatatacagctccccggaatgtgacggagctgaaacttacccgcatatgggaagaagtgcttcaaagcggcccgatcggcgttcacgatcactttttcgagcttggcggccattcattaaaggcgacggcactcgttgcaaaaatagctaaagagtgcagtgtgcaaatcccgctgagcgatgtcttcagccatccgactgtagaagaactcgccaaaatcatcagtgaagcagaagagaacccgttcgcatccatagaaaagacagaaatgaaagaaacatatcctgtctcatccgcccaaaaacggatgtacgtccttcaccagcttgaaaatggcggtgtcagctataacattccagccgttttagaggtgaaggggccgtttgaccgagacaggatggaagccgtgttcaaggaactgatccggcggcatgaaccgctcagaacgtcctttgaagaaaaaaacggcctgcctgtgcaggggattcatgacgacgtgccgtttgcatttacaaaagaacaatcagccgaagcgtttatccggccgttcgatctcggcaaagcgccccttttccgggcgggatttgtccaaatagaaaaagaccggcatctgcttttagctgacatgcatcatattatttcagacggcgtatccgtcaatcttttgatacgtgaattcagtgagctgtatgctgagagaagtctgccgccgttacggattcaatacaaagattatgccgtctggcagcaatcatttatggcgggcgccgcatatcggaaacaagaggagtactggctgaaccggcttgccggtgagattcccgtgcttgaattgccggctgataagccgcgtcccccggtgcggagcttttccggtgaccgggtgtcatttgtcatcaatgaaaaacatacagcacagttgaaaaagctggcgaaagaaaacaaatgcacactgtatatgacgctgctcggtgtgtacacggttctgttagcccgtttaagcggacaggaagatatgatcgtcgggtctccgattgcaggaaggccacatgccgaccttgacgccgttctgggcatgtttgtcaatacgcttgctttcaggacgcgtcccgacggaagcatgacattcaaagaatatttaaaggaaattcgccaaacagcgcttgaggcttacgaacatcaggattacccgttagaagagctcgtcgataagctcggtgtgccgcgggacatgtcccgaaatccgctgtttgacacaacatttgcgctgcaaaatatggaacagcagaagcttagggcagccggacttgaactgcagccggcagacgtcagcctgccgatttctaaatttgacttatcactgtacatctctgaaaacgccggtgaattgtactgccagtttgaatacagcaccgatttgtttaagagaaaaacgattcaaaaatgggcgggattttttacgacacttgccgaaaacgccgcggctgatccgggcttggaattagacgatatttctgttttgacagaaaaagaagaagtgtctctgcttcaagatttcagcccctttcagaaaacagcgtttccgcttcatcagtctcttcatgatctgctggaacagcaggcggaaaaaacgccggaccgtccggcaattttaactgatgacatttcgattacgtatcaggaactgaacgaaagagcaaacgagcttgcgcatcagctgatcaagcgcgggataaggctggaggataaaactgccattatgggccggcgttctcctgacatgatgatcggcatttacgctgtcttaaaagcaggcggtgcatatctgccgattgatccggattatccggaagagcggattcgctttttactgaaagacagcggcgtgaaattcttactggcagaaccagaacttttcgcaccagatctttttgagggagaaacgctctctctgaaaagcggacaaacaggaaaccctgaagctgcggccaaccctaacgttccggtaaaacctgattcattggcttatatcatctatacatccggttctacgggacgcccaaaaggcgtgcaggttgaacatcggtcagccgtaaactttttatactcactgcaaacgcgttatggattaagtgattctgacatcattttgcataaaacatcatactcttttgacgcttcgatttgggagctgttttggtggccgatcgcgggagcttctgttttcctccttccgcaaggcggcgagaaagaccctgaaatgatactgaacgcattggagaataaccgcataacggcggctcattttgtgccatccatgcttcatgctttcttggaatatataaattccagaaaacagccgatcaaaaaaacctgcttaaaaagggtttttgccggcggcgaacaattgggcccgcacctggtttcccgtttttatgaccttctgccgggaacggaattgacaaattcctacggtccgacggaagcgacagtagaagcggcgtactttgatttgccgcaaggaaaagaatttcacaatgttccgatcggcatttccgggcataacatgcggctgtatattttaaatcaaaagaaacggcttctgccgccgggctgtatcggagagctgtacatcgcggggacaggggtggcccggggctatctgaaccggcccgagctgacggaggagcgttttctcgatgatccgttttatccgggagagcgcatgtatcagacgggcgatatcgcacgctggacagaagagggcctagtcgaatggctcggacgttcagacggacaggtgaaagtccgcggctaccggattgaaccgggagagatcgaagcggcgatccggcgcatcgacggcattcgtgaggcggcggtcaccgcccggaccgaacacggcgaaaccgcgctttacgcctatatcgaaggacgggaaagcgatgacgtgcgggcggagcttgcgacacgccttccggtctacatgatgccggctcagtttatagagatgagcgaatggccggtcacgccgagcggaaagcttgaccgccgcgcgctgccggctcccggcggagcggcagacagacaggcgtacaccgccccgcggaacgtcacggaaatgaagctttgcgccctttgggaagaggtgctgaaaaacggccccgtcggcatccgggatcacttttttgagcggggcggccattcgttaaaagcgacggctctcgtctcccgcatcgccaaagagttcggtgttcaggtgccgttacaggacatcttcgcccggccgacggtggaagagctcgcttcggtcattcaggatttggaagagagcccgtatgaagcgattcagcctgcgaaaaaacaggacacctatccggtgtcttcggcgcagaaacggatgtatgtgctccagcagcttgaagacggcggtgtcggctacaatatgccggctgtgctggaactgacgggcccgcttgaccgcatccggctggaggagacgttccgggagcttgtggagcggcatgagtcgcttagaacgtcctttgaaacggggcctgacggcgaaccggtgcagcgcatccatgacagcgtaccgtttcagctggatgaggccgagtcagctgacgcattcgtccggccgttttgtctggaggaagcgccgctcttccgtgcggctctcgtgaaagaatcagacgaacgccatctattattaacggatatgcatcatattatttctgacggtgtgtccgtcaacaccttgattaaagaattcggcgagctgtacgcaggccgttcgcttgcgccgatgcgccttcaatataaagactatgccgtctggcagcggtcatttcaggagaaagaagggtaccagaagcaggaagcctattggctgaagcggcttgaaggagagcttccggtgcttgagcttccggctgacaagccccgtccggctgtcagaagctttgcgggcggcagcgtatcgtgcacgcttgacgctgaaacggcatccggccttcaccgcatcgcccgggatcacggctccactttgtatatggtgcttctcgccgcgtacaatacgttactcgcgcgattgagcgggcaggaagacatcatcgtcggctcgccgattgccgggcgtccgcacaaagaccttgaaccgattctcggcatgttcgtcaacacgctcgccatcagaacggagccgaaaggaggcaaacggtttactgattatttggcggaagtccgccaggccgcgcttgaggcgtatgaacatcaggactatccgtttgaagagctagtggaacggctcggtgtgcagcgggacatgagccgcaatccgctgtttgatgcgatgtttattcttctgaatatggagcgagaagagataaatctggccggtctgaaagcgtcacgatcagagcataccgaacatgatgtatcaagttttgacctgaccttatcagcggctgaatccgatggaaacatccgctttgaaatggaattcagcaccgagctttttaagaaagaaacgattgaacgctggatgggccacttactgaatctcttgcgccatgttgccgccgaaccggaagtcacactatcgaaagctgacattttggatgaagaagaaaaacaaaagttactgattgagtttaataacacacaaaccgaattcatggaaaaacacaaactgtttcaccagttgtttgaagagaaagcagaagaaacgcctcatcagaccgctgttattgaaggaacacaacagatcagctattcgcagcttaatgagcgggcaaatcggcttgcgcgaacattacacaaaaatggattcggtccgggaaaaagagcagctatattggcaaaccgttcgattgaagcgatcgtcagtgttcttgccgtcatgaaatcgggaggggcgtatataccagttgactcccattatcctgaggaacggattcgctatttattaaaagacagcgcggcatccgtcttgatggtgcagtcagaatacaaagaacttgcttcacagctgacggatcacaatttatttctcattcagcttgatcatgaagatcaatacgatatttgtgcaaagaatattcagccggcagcgtcaccggatgatactgcatatatcatatatacttcgggaacaacgggaacgccgaagggagtcgaagtcagaaatcgcagctttacgcatgcagcacttgcatggcgcaggatttatgagcttgatcttataccggtcagagtgctgcagatggcgagtttctcatttgatgtattttcaggagatcttgcacgcgccctgctaaacgggggaacgcttgtcatttgtccggatgacgtccggcttgagccgcaacagctttatcggctcattgatcagtaccgtatcacgtttatggagtcgacacccgcgctgattgttccgtttatggaatatatatatcgccggaagctcgcgctgcaaagtgtaaaaatactggtactgggttcagatatgatcaagtcgcaggatttttatacgcttcatgaacgcttcggaaaagaaatgcggatcattaacagctacggtgtaacagaagcgacaattgattcttcgtattatgaagccgaaatgagcgaaaagccgcgggaagatgatgtgccgatcggtgttccgcttccgaatgtacaaatgtacgtcttaaacaaagacaaacaggtccagccgatcggcgttttcggagagctgtatatcggaggggccggcgtcgccaaaggatattggggacagcctgagctgacagagggcgcattcagtgacccgttacaaacgggagaaacgctttacagaaccggagatcaggcttgctggctgccggatggtactcttcgttttaaagggcggatcgataagcaggtgaagatcagaggatacagaattgagacgggagaaatagaaagtgtgcttttgaaacacgatcaagtcaaagaagcggctgttaccgtgatgaaagatgccgaaggacaagcccgattagcggcatacatcgttcctaaagaggccgatatctcatcacttcgccagtctcttatgcaggagctcccggcttatatgatgccgtctcatattatcggtttagacagcatgcccctgacactgaacggcaaacttgataaatcggcactgccggcagaagagatacattcatcccaggcatttgtcgcgcccggcgatgaaaaacaggcgatgttatgccggatttgggaagatgtgcttcatattcagaaagcgggaatccatcactctttctttgagcttgggggagattccattaaggcgcttcaagtgtcagcccgactcgccggagaaggctggaacatgtcgatccgcgatttgtttcagttcccgacgattgcagaactcgcgaagcacctcacgccggctgttgcaactgctgatcaggggccgatagaaggaagcgctccgctgacaccgatccagcagagattttttgaggagccgggtgcgtttgagcttcattataaccaagcggtcatgctgtgcagtgaagacagcctcgaaatagatgcgctgtatcaggcggtttgcgcgctgacagaacatcatgatgcgctgcgaatgactttcactgaaaatgagcatggggaaacggttcaatataatcgcggaatcacaaagcagtatgaagaaatatttacgcttaacgtcatagatatttcagaagaaacgcagcccgaaaaacggatagccgctgaggaaaaagaaatacagcaggctatgcgtcttgatcaggggcctctgcttcatctcggagtgttccgtcagaaggaagccgaccatcttcttataacgattcatcatcttatcgtggacggcgtgtcatggaggatattgcttgaagatctgcagacagcttatcagcaggcattggacggcaaacaaatcgaactgccgccgaaaagcgattcttatatcaaatacgctgaagaactttttgacatttccaaaagcaaagcattgctggaggaagccgcatactgggacagcgtgatgtctagtgaaacagcgccgctgccgaaaataactgatgaaaacgccgggcgattgcaggaaaacgcgcgcactgcatcgtggatattaagcagcgaagtcacgaaacagctgctgttggaaacacagcaggcatacggaacggatgttcatgaattgcttttaacggcgcttggaatggcgcttcatgagtggacggattccgaacagatgcttatcagcactgaggggcacgggcgccaggggcatatgcctgacattgatatgtcaagaacagcaggatggtttacatctgtttacccggtgcttttggatatgagagtgccgggcggctcaggcgaaaaaaccgctcaccgcataaagacggtaaaagacatgatgagacgggttcctcatcacggaaccggctacgggctgctgagatattcgcgaaacattctttataaagacccagaaataagctttaactatctcggtgcgtttgacggtcttgagggaacgctgaagatgtcaccgttcaagccgcagcatgatatagcggccgggcgcatccgcgagtttgatctggatattaacgcgatggtggcggccgggcaactggaggtaaaagccgtttataccgatgtatttgcaccgggggcaatcgagttcttcatgaatcgtttccatactcacatcgaggacatcatcgcccactgttccggcaagaaagagcgggaaaaaacattaacggattacagccatacagaattgaccgctcaagcactatcaagcattgaagatctcgtaaaaggactttaatttcataaaaaggtgtgtggcattcgtgacacaagcgacagaaattcaagatatttaccctttatcatatatgcaggaaggcatgctgtttcattcgcttctggattccggatcaaacgcatatgtcgagcagatttcgtttacagtcagcggggatttatgcattgatacattccaaaaaagtctggatatgcttatcagccgttatgatattttcagaacgattttcataaaagaagtgcctgaccttgaaggaccgcagcaggttgttctttcacgccgtgacacagccgtacagactgagaacatttcagactattcggaagaacggcagcaaagcatcattaaggaattcaaggaaaccgaccggcataagggctttgatctgcaaaaaggccccttaatgcgcctgactctttttcaaacgggagaaaaccgccatacatgcgtttggactcaccatcacattatgatggacggctggagcttgggcattgtgctgaaagatttcttcagcatgtattatgcgatccgaaacgggcggcctgtaaacctcggcagtccggctccttacagttcttatatcaaatggctccgaagccggaataaagaagaaacgtcagcgttctggtcgcgctgcttggaagattacggagaagtcgtttccgttccgcaaacgaagaataagccggcgcaaaacggttatgcatctgagcattttcaattttcccttgagtctgaaaccgtgcaaaagctgacagacattgcccgaagcaccggggtcacgctgaatactttatttacgagcatttggggactgcttctccaccgttacaacggcactgaagatgcggtattcggttcagttgtttccggcaggccgtcagctatcgccggcatcgaatccatggccggactgtttatcaataccgtgccggtaagggtgcgcgcggctggggatatgactttttcttctcttctcaaaaaggtgcaaaaagagtcactcgctgcggaagagcacagctattatccgctttatgacatccaaaacgagagcggcctgcaacaagatctcttgaaccacatcctggtttttgagaattatccggttcagatgcagactgcggtaaacggctggaagcaaacggaaagcagtgcgctctcacttgaaaacttttcgatggcggaagaaaccaattacgatcttaacgtcgtcattgttccgggagaagagttttatgtgaaattcagctacaatgcgggcatctacgatcgggaagacatgaaacggatcaaagggcatattctggaggtcatctcctgtgtaacggaagatccggacaggcttttatcaagcatcagtctcgtgcctccggaggaagaagccttgattcattcgtttaacgaaacgaaccgtccgtaccctgagacaaccgttcatgggctgtttgaagaacaggcggcaaaaacgcctgaccaagaggcgttgagatataacggggtaagctggagctacaagaaattaaatcagcgggcgaatcagattgcgcatgcgttaagggaaaaaggcgcatgccccgaccagatcaccgctgttatgctgcgccgatcaatgagtacggttgccgctctgctcggaatttggaagtcgggcagcgcctatatgccgattgatgcggaattcccgcctgaacggatttcatttttactgagagacagtgaagcctcactgctcgtgaccgaaaaggacctgctccccctcattccgccgcatttcaagggcaacgtcgtcatcatggaggaaacggtttcccagcagaccgcaccgcttccgccggtatctgacagcggaaattgggcgtatgtcatttacacctccggaacgacaggccggccgaaaggggtgcttgtacaacacaaagcgatcagcaatacattgcaatggcggcgtgaagaatacgggatgacagaaggggacatagcgcttcatcttttttcatacgtatttgacgggtcattaacgagtcttttcactccgcttctgtcgggcgcctgtgtattgttaactgatgaagatgatgcgaaagacgtcctttcaataaaacagaaaatcacccgccacggagtgagccatcttctgatcgttccgtctctgtatcgcgttctgcttgattcgctgacgaaaaaagatgcgcagacacttcgggcggtgacatttgccggggaagcggccactcctgatatcgtggaagcgagccgcggcatatgcccgaatgccgagctgctgaatgaatacggcccgacggaaaacagtgtggccacgacgattctgcgcaacctgcaaaaaagcagccggattacgatcgggcgcccgattgccaacacttctgtctatatgatgcacggagatcggctgcagccggtcggagccgtcggtgaactgtgtatttccggaaaaggtctggcggatggatattttcagcaaaaagagctgacgggcaaagtctttacccctcatccgtttcgtgaaggtgaacggctgtacagaacgggagatgcagcccgatttttaccggacggaacgattgaatatatgggacgctttgacgatcaggtgaaggtaagaggttacagaattgaattaggagaaatcgaaacggcactcagaagtctgtccggggtaaaagaggcggcagtcatggtgcgcaaaacggcggacggggaacaggagcttgcagcttatgtcgtactggaaaatgcgggtgtgacatttgaccctcatgccgaattggccgggagattacctgcttatatgataccgggaagctttaccaaattaacggaaatgccgctgtctgtgagcggaaaacttgatcgggccgcacttcctgagccgaaagaagccgggagaaccggtgattatcaagctccgcgcacaatgcttgagactgagctgctgtctatttggcaagaagtgctgaaacgggaacacatcagtatgagagatgatttcttccaaatcggcggacagtcgctgaaagccgcgtcgcttgtttcaaacatacataaacggctgcaaattgaacttgccgtccgccatgtttttgaacatccgaccatcgagagcatggcccgcttccttgaacagaggaaaagaggagaatatgcagaaatcacgcctgcggaggcaaaggacttgtacccgctatcttttgcgcaaaaaaggctctatgcccttcatcagcttgcagcggacagtacgggctatcatatgcccgcttgtctggaactgagcggcagactcaaccgggatcgtctgcacgaagccttttcagcgctgttacaaaggcatgaagcgttacgcacatcatttgttttacgaaacggggagccgatgcagcacatacatgcacatgtcgatcttgacctcacagagattcacatgccatccgggaaccttcttcaagaggtgatggaaactttcgtcaaaccgtttgacgtggaaaaagcgccgcttttgagagtgactttagccaaagttactgaagaacgtcattttctgctgcttgatatgcatcatcttatcgcagacggtgtgtcaatgagcgttctgattcaagaattgacggatttgtacagaggaaaagagttgcggccgttaaaactccagtacaaagatttttccgtctggcagcatgagcggtttgccgctgaagaattcaaaagacatgagcgttattggctggatgcgatcggggaaaacattcccgttcttgatctgccgctcgataaaaagcgccctcagcttcctgatttcagcgggtccgttgttcgaacgcgccttcaaaaggaaacggcggagaacttgcgccggctcatggatgagacgggttcgacactgtatatgattcttttggcaagctactccttgttcctttctaaattgggcgggcaggaagacattgtcgtcggttcacctgcggccggcagaagccgcgctgagcttgacggggtcatcggcatgtttgtaaataccgtggcaatgagaagcaggccgaaaggggataagacattccgcgcttatttagaagaggtgaaaatgctcgccctcggcgcggccgaacatcaggacttcccgtttgaagaacttgcccaaaagcttgatacacaccgggaagtcaatcgcaatccgctgtttgatgccatgctcgttttgcaaaacagtgatgatttcgaagtgaaccttccgggcttatccgtttcttcacatgcagtgaagcatgacatttcaaaattcgacttgacgcttcatgccgaggaacggccggatggctcactggattttcattttgaatacagtaccgcgttgtttgaaaaagatacgatcgaacggtgggccggtcattttaaagagcttttaggacaaattgcagcagattacgaacggaagctgtctgacattcatttgctgggcataaacgagcggcagatgcttcttcaagcggaaaatcaaacggcggagtatccgaggcatgaaacgattgtcagtttattcgaagcacaggcggaaaaaatgccggatcaaattgcagccgtcatgtctcatgagcgtctcacctaccgcgagctcaatgaaaaggcggatcgaatcgccgatatgctgtcggaaaacggcatccgctccggacagattgtcggatttatgaccgaacgatctccggatatgctgattgggattctcggtattttaaaagcgggaggagcttatctgccgattgatcctgactatccggacgagcggatttcatttatgctgactgacagcggcgcgcgtgttctgttgacgcaatcgggtcttgggatatccggaatggacgggctgccggttttatacatcgataagcctgaatccgtttcagcagacagaacgaaagaaataataacgcctgaacagccggcttacgtgatttacacatcgggcacaacaggaaaaccgaaaggcgttatgacggaacaccgcaatgtcatcagccttatcacacataaaggactgccgtttgatttcggctctgaagacgtctggacgctgttccattcctattgctttgatttttctgtctgggaaatattcggcgcgctcttatacggcggaaaggtagttatcgtgccgaaagacacagcccgtgatccgcatttgtaccggcagctgctgcaaagtgaaggcgtaacggtgctgaaccaaacgccgacggctttttccggactcattcatgaagaggccgggcatacggacaagctgaagcttcgatatgtcattttcggcggagaagcgcttcagcccggcatgctgaaaagctggaaagagaagtacccggagacggagcttgttaatatgtacggtattacggaaaccacggttcacgtcacatgcaaaaaactgaatatggatgatattgagagaaacaaaagcaatatcggcagaccgctggaaacccttcatgcttttgttatggacgcctatatgaatccgcagccgatcggaattcccggtgagctttatatcggcggggaaggcgtcgcgaggggatatgtaaacagggatgatttaaccgcctcccgtttcatcacgaatccgcacgtttccggcatgcggctctaccggacgggtgatatcgccaaaaggctctcaaatggcgagctggaatatgtcgggcggaaagatgcgcaagtaaaagtcagaggccacagaattgagctgggagaaattaaatcagcgctgcaagagctttcctccgtgaaagaggccgccgtgatcacacgtgctgatcagcacggtcagcactccatttacgcatacgcggtcttacacgggaacgaaaagataaaagaagcagagattcaggcctctctcagagcttttctgccggaatatatgattcccgcccgcttgatagcgcttgatgaactgcctttgacggcgaatgggaagctggacgagaaggcgctcccgcagcctgaattaaatgatagccttggaaatgatatcagcctgagaaatgaaactgaagaaatgatggctgacatttgggaagaactcttaggtgttgaaggcctcggtcccaatgctcatttcttccatctcggcggggattcgattaaagcgctgcaagtatgtgcgaggctgaaacagcagggctatgaaacgaccgtccgcgagctgttcgagcatcagacactgggagaagtatcgatgcggctccggaaagtccgccgcgtgattgatcaggctcccgtcacgggagacgttccgctgacgccgatccagcactggttcttgtcgcaatcattgccgcatgatcattttaatcagtcggttatgctccgcagtgcggacagaatcaatgaatctgctatgagaaaagcgttggcacagcttgcggttcatcatgacgcattacggatggtatgcggcacgcaaaacggatcggtgattcaatataacagagcggaaaagctttctgaagaagaactctttacgtttgaaacgcttgacgtgagagggaaagggtcattacaagaggagcacgccgcaattgaacaggcggccgcctgtattcaaacttccattcggctggagacgggtccgctcgtagctgtcggattatttcacgctaatgatggcgatcatctgctgctttccattcatcaccttgtcattgacggggtgtcatggcggattttatttgaagatctcaccgcatgctacaggcaggtgctcgaaggaaaagaaaccgcgcttccggcaaaaaccgattcctatcagacttacgcgaagcaaatctctgattatgctaaaagccgccggctgttacaggaagcagactactggtccgaaagagaaagagcggcggtcgaaccgcttccgaaagatgcccgcatctcttccaatcttctgaaagatacagatgtgatgaccgttacattgacgaaacaggagactgagcagctgttaacggaagcgaacagagcatacacaacagagacgggtgaattattgcttgccgcgttaagccttgcgctgaacagatggaccggaaacgagacattcaaaatcagcatggaaggccacggaagggaagagcacttggagcatcttgatatcagcagaacaatcggttggtttacgtcaatttatccggtattggttgacgcaagttttcaagatcaggctgatgacggcgagcggctcggctatcacattaagcggacaaaagacatgatgcgccgcattccgcataaaggagcgggatacggggtgctgaagtatataagcaaactctgggaagagactgaatccgattctcctgaaatcagttttaactatctagggcagtttgacagggagatccgttccagcggctttggtgtttctcccgtaaaagcgggaaatgaagtcagcccagactgggaacgtccgtacacacttgatatcagcggctccgtatcgtcggaatgtctcagcatgcatgtcgtgtacaaccgttttcagtatcaaaaagaaacgattgaagttttgacgggatattttcatgcctttctcaagcagatcatctcgcattgcacaggcaaagaggagcgtgaatggagcgccgctgatttcagtgacgaggagttaacgctggaagatctgagtgacattatgggagccgtcaacaaactatagaaaaggagtggcgcaatggggcagcaaccggaaatacaagatatatatcctttatcttttatgcaggagggcatgctttttcattctctgttggatcatgactcaagagcctacttcgaacaagcggtgtttacgatcaacggacagcttgaccgggaacgattccaaaaaagtatagatgctgtttttgaacgattcgatattttccgtacgacatttattcataagaatgtggcgaagccccgccaagtcgtgttgaaaaacaggccgagccgcgttcagtttcatgatatttctcatttggacgagaaggcacaagacaaatataccgaccggttcagaaaagaagataaagataaaggctttgatttgcaatcagaccctctcatgagagtctccattttgaaaaaagcgcctgaacgctatgtttgtatctggagccatcatcatatcgtcatggacggctggtgcttcgggattgtcatgaaggaatttctgatgatctatcaatctctgggagacgggcggctcccgtctctcgagcctgttcagccatatggtaagtatattaaatggctcatgaagcaggatcgtaaagaagccgagattttttggaaaacgagacttgccgatcttgagcaatcggcgtctcttccgaaaaaatccgcggaaccaaatggcgaacttgagcaggcggttttcaccatttctgaagagcagacaaatgagctgaagaacattgcggcaagggcgggagcaacgctgaatacagtgttccaggcactgtggggcatgttgctgcagcgtgtcagccgctgtgatgacgccgttttcggttctgtcgtttccggccggccgtcggatctcgcaggcgtggaaaaaatggtgggactgtttattaatacgattcccgtgcgggtgaaaagcggttcattttcttttctggagctcgtcaggcatttgcagcaggagacgctgcaagcagaagcgtacagctattatccgctgtatgacattcaagcgcaaagccctttgaagcaagcgctgtttgaccacattatcgtgtttgaaaatgtgccggcccagcgtgaaattgaaaatgtgagtcagtccggttcatttgattttgcggtagaagatttcacgatggaggaagtcacaaactacggatgcagcataaaggtgattccgggaaattctctttatatccgcttaaactttgataccggtatatacgacagcgtttttatgaagaatatcgaaacatttttacggcatatgatgaattcagtcatctccgatcctgaaatttgcgcctccgagatcgcattgcttgatgcgcgtgaagccagaagtatgctggatgcgtttaaccgtacagaaacggttgaaccgccggctccgacgcttcacggactgtttgcccgccgcgccgcgctttcgccgcatcgtccggcgctccgttttccgggcggtatgctgacgtacgccgagcttgaccagtacacagacagactcgctgtttggctccgccaaaaaggcgtccgcaaagaaagcatggtcggcgtgctcgctgaacgctcgccggagatggtggtttcagtgcttgccgtgttaaaagcgggcggcgcctacgtgccgcttgacccggagtatcctgaggacaggctgctctatatgctcgatgactgcggcgcttgtatcctgcttgcacagccggggttatccgtttccggtttttccggcgagacgcttgaagtgtctctttcttctctgacaggcgagacggagacaggggctgtctctgaagaagcggatagcgattcgctcgcttatatcatttatacgtccggttcgacgggaacaccgaagggagtggctgttgaacaccgtcaggccaccgcctttttatccggcatgcaagggcagttcccgttgacggaagaggatattatcgtgatgaaatcatccttttctttcgatgcttccatctggcaattgttttggtggacgatgtccggcgcctccgtgtatctgcttcctgccggctgggagaaagatcctgtgcggatgattgaagcgtttgcctcagaaaaggtgacgaccgcgcattttattccggcgatggtcaacagctttttagacgcgctggaaacagagcctgcggaaacaagaacacgcctcggcagaaccttgacacgcgtgtttgccggaggggaagctctttcaccgcttacggctgcccggtttgccgatcttctgcc

SEQ ID NO: 2 - DNA, 511702 bp, Bacillus methylotrophicus
tccacccaaatcaaagaaattgtcatttacacttactctttccataccaagtacatgttcaaatgcctctactaccaatttttccgtctgggtctttggtgcctcataaccccttatcatcttagtttcttcaataaactgttccgggttcggcaataatttacgatctactttaccatttgcagatagtggaatctcatctacctgtatgaattgtgccgggatcatataatcaggcagatgtttggctaactctctttttatttctgccaattctacggtctcatctgcaacaatatacccacacaattgcttctctccatgtgaatcactgtaatcagcgacgacggactggtgaatatgtggcaaatgattgatacagtgttctatttctcctagttcgacacgatgtccacgtatcttaacttgactatcttttcttcccaggaagtctacatatccttccggacgcatgacaccataatcacctgttttgtacagataacctaatctatggttgataaaggcggccttcgtcttctcttcttcattgagataacctgcggcgactccttttccaccaatatgcagttctcctggtacacctactgggcattcttccccacattcatccagtacgtaaatttgttgatttttcagcggatagccgtaagggatacttttccactctggcttcacttctgtgattgggaaatatatggaccatatagagccttccgttgctccacctaacccgatgacttgtgcttttggcattcttgttttgattttcgctggcaaaccaagagaaatccagtctccacttagcatcaccatacgtaagcgctctgctgaagtgctatgcaccgtgtcttgctttgtgctttctagatacatatccataattgccggaaccgaattccatatcgtgatttcttcttcgatcatgatctgatgaatactggccatatctaaaagatctggaattaatactaactgagctccgctaatgagtgctccaaaaatatcatagacggataaatcaaagctcatcgatgatagggcaatgattttatcttcgctatttacttggaatttctcattaatatctaataatgtattcactactgcttcatgggtgatcacaacacccttaggatgtccagtgcttcctgacgtatagatagcataggctctatcctgctggcagccttctaacagttctaaggcgccatcgttataggtggaaaggttctctgtttcatataaatccggatgaatcatgagcttgatatcactatgttccacgatatattttattctttcctcaggatgttccggattaacaggaatataagcatggccggcttttaaaatagctaccatatttacaatggtctcaattcgtctctctgcccaaactccaatataagaattgagcgcatagttttgttctgctaaataacgagcgacctgattggattttctcgccaactcgccataggtcaatgtatcctgtcctaatttgactgcaatagcatcgggagtcttctggcattgctggtctattaatctttgcagtaaatccccttcataatctccttgtgtacgattgtaatcaagcagtagttgatactgtgttacaggcagcggcatagatgaaagtttattgtctataacttgctgtaatcgaagttgatacgtttcaaacatggcactgatcatgtcttcatcaaacaaatcttttgcataatcccaagtcacaacaccactataaaaacgatggtctactgcttcaaataatatatcttgaaccatagatgctttctcccaaaaagcacgatgaacagataaatcaatatctaacaataaaactgatgtaaaatctccaatcaacttcattacgtctggatgaaaggactgtcgattaaataatgttaaattaagtgccattctggattgattgctccatttgcacaaaacttccgcataaattgtacataagaatacagatggtgttacaccgtactgagttgccaggcccttcacaatattccattgatcagttgtcagacttttctccattcgctgaaatattggtttctctatgaattctggctcacaaactaatggtagctgaggtgcatagggaaaatcctctattttggcttgccaatagtcttgagctttttgataggcggaagattcacgaaagctctccaatgcccttacataatctgagaattggaatgttaaaggtttaatctccatattcggtttctcataataatccattatctcttgtattaaaattaataaactgcctccatcagcaattaataagtcaatatccaggaagagataatttttcttctcaccaagaataaatgcagtcaactcaaataatggccaatgatcttgttggaaaacaaaatgtgacctgctatttcttttttccaatatacgtttttgttgatcctctaaagacaagtcttgtaaatcttcaatacaaatctcataagaagaattagaacgccgaactttttgcattcctgtatcatcaaaaatagtacgcagcataagctgacgctctaaaacatgattcaatgcatcgtttaagcgtttaatatctaattctgtttcaaactcataataggcatgtgtggagacattacccatttccataatattttgtcttccaactaaataggctccttgtatttctgttacctggaacggctcataccacatgtctttattccctgttaattcggatgcattgacatcctctgcctttagttgttcctcaaccatcttaattatttgttccagggtggacattttgaaaaggcttacaatagggatttcgacttgaaatcgttgatttatttcatcctggaaacgaatcaacgttaacgaactaactcccatccgagaaatcgtatcgtctactttcaaagaagggatagagaatacttcttttgcaatttcaacgatttgattttcaatctccgttttgttccatgctgacttctttgcagattccttgatactctgataagaatatggagctattgcgataacttcatcaaactcatgattctcaaatcgctctattaaaagaaaacgttgcacctttccacttgttgttttcggtatcgtttttattggaattacataatctgcagctattccaacccgttctaataccatatcctgcacttgatgggcaagtggcaaaaatgccttggcatcttttcgattatgtacaaatactataatttcatccctgatcgatgacggattgcgaacaccacacacaacgacttgagacaactctgggatcgccaatgttaacatattttctatatcgctagcataataattctgaccatttacaaacagaatatccttctttctgcccattacaatgagttctccattgcgtaaaagtcctaaatctcctgtacagaagaagccctgttcattaaaaggggaactatcatgattcatatatccctcaaatacatttttccccttgatcactatattgcctatgtaattttcccctaagatgtggtcttcatcatctacaatcaatatttctaattcatataatggttctcctactatggcaaactctgctgcatttggctccttcgtttctatatactccacttcttgaccaatacgagctttatgacggttaatacatacacttctattatgtccttcttcaggaatagtaacagccagactagcttctgccataccatagacttgatggatcgtattttcacgcaagccagaagacgagaatttttcataaaatcgtctaatggtatccattgatattggttctgcaccacacattatgtttcgcacactagataaatcaatattttctaaatgtgaattctttacagtctttatcatccagtctaatccaaaattcggacttacaagcaccgttgcttttaattgcgcacatttttgaagatatagccaagatttctttaaaaatgtacccgaatttagaagggaatgagatatacccgcaaatatcggagttaaatgataaccgatcaagcccatatcatgtgtcaatggtaaccaactagccatgacatcatttgtgtctagtttcaaacgatctactatctgtgccaaattataaactagattttcatgtgttaattttactcctttagggttacctgtgctgccagacgaatattgtatatacgctaagtcctgacaatctactgtaacgcattgcccctcttccatattacatgctaaggtttcatactctaagtatttcaaattattggcttcataactttctctaaacgtatttaaatttctttcatcagtaattatccacgcattcggcaactgctcacttactttcactaacttcttgaaagcttcagtgtcaggcgatgcaattagcggtacagacagaggaacggggatcatgcctcctaaaatacaaccccaaaacaaccttataaaggataaattattgtttgtctgaaagataatataagagcccttctgaaatccctgcttttgtagtgcccctaagatggatttggcattaaaataaagactttcataagactcaaacaattcagagccatcggattgagtaaagtaaactccccttgatttctcgttagcataaattccaagtaattgatctagtgttatattaactccatcctctaatactgattttgtatagggtttcatattgcacctcttaaaaagttattgtttttatgctgcgatattatctttgttacaattgatgcaacgtcttgatcttgcctctttaatattaaaatttatgttgagaattatttatgtatattggcttctataattctattatattatatttaaggattatatcaacaaaattcttaaaatttttccagttcaaagggcgtggtttaaacccaccgcccttagccttcgggttggatagtaataatcagaatcacttaaaaaaacactcaataatgcccccgttgtcaagacacgattttttgaggaaaaagttatgtccttcttatcatgtcatgtagcatttcaggatgcgatctgttctcaatatatcatttttttacattttccaatttaatagcgtgcagaaaggcaaacagcctctgcacgcttgtgtataaatcttaaatttcaacttatatcttataccatacagcagtcattttcttgatcatccagacggtgccacatcaaatgctcatcggtttcccttgatagtcaacgaaaacaaattcactatcgatacgaacttgtcgattaatgagattataaatatcttctgctgtttcttttggatgtgtcggggctatcattcctcctatatccgtccttacccaccctggatggacggaaaggacttgaatgccttcattctttaatgctacatggagcttctcggacaacatatttaaggcagctttcgacaatccataaggataatcaccactatatgcatttgttagactaccaccttctgacgagatgttgataatggattgattctcaccctttttcagcaaaggtagaaaatgtttaatcacacgggctggtcctaacgtgttgacatcaaatgctagtttgatagcctctatatcaagatcctcaatagacgtaccccttccattaagaatggcagcattattgataatcacatcaagactttcacctacattacgagctgcttcacgaacagattcctcgtctgtgacatctaaatgaagaatttataactggttgctatttttctcttttaatttggttaattgagtccttttttgttcattcgcatctctgactccagcaaaaactcggtaccctttttctaatccaacttcgacaaatccaagccctaagcccctatttgccccagtaattaatatatccaccataatcctcccagatttttttaatagttattttacggatgcatgtgatagcaataggtaagactttgatgtaatcgccatcttttcccctgctccacacccaacgtgcgattttcaccgcattgggcgttccatcttattcttttatgctaaagtaattctacaaatttaaggttccatatcgcatctatttgagtatcaaaggttttaatttcataatataaattataaaaaaaatgaacaaaactaatacaatcctattctacctttacatgatctaacaatttcagttcaaatccacagttacatttttttaatgtttttcttatcggagatatcttactgttacatcttgggcattcattaaccaaatacaaattatgtatgggacaaataacattaactgtatagttccaaattttattctgataaaaattcccattaaaacaagctgggcaaattttatcagcatatgaattaatacctaacttaaagcccgtccttataaatccaagattagtggtatccataattttatcattaaaagtcatactccataattctctttcagtaataccagtaatgttgctcagtaactctaaacttatcttacccgcatcacctctaacaattttctttttttatctgagccatagtatatatccaactagaattttcataaccattataatcagttattcttaatatatatcctgctaaagattcatcttctaaaggttttggagttagcaataacctttccaataagccatacctctccttcatttatttttttattatttcaaaataaaacagctaagaaaatataattttcttagctgttttattttgaaatctagtttaggagttcttgaaactattccgaataattatgaaaaatcacattataatgctgtcatttcttcgtgctcgtgttcatcctgcacgaataaaatacctaattcatgatgttcgccttcataggacgcgcgctgatcaaaccggatctcaccgttcaggccgatgatctccatttttacaaatgcgcggtttttttgaagtgcttcataaaaatccgatacatgcttcacggggatgccgtttactttcgtaataatctcaccgatcttcagctcaagatcgtccgcgggtgtattcggaatgatgccgagcaccattaaaccctgatcccgcttagagaaataaaacggagccgcgttatcgttcagccgctgtcttaatgataaaaacaggcgtccgagcaccgcaatacaagcggcagctccggcaagcggagtccaccaaagggccgctgccccgaatgcggtcacgataaccccgagaatcatgacacgtttcgctgttatccttatgctgacttccggaagtgacccctgcacacgctgtccgaagccggcgatataaggaatccagatcaaatggaaagagccgcccggcacggtaaagacaggccaccaagaaaggtgtgactcaagcccgctgcccggcaccaataagaaaagcggaagcagccatgcgcgattcgccaattgtcggccaatgggcaggcctctgctgctgacgacaagcgccggagatgttttcagatgcgctgaacggcaggcagccgctccctccgtgataatcaaaaggcccataaacacggccgccgatgcccaattcacgccgaatgcctgcggaaaccgatccgcaaacggcactgtgtgggtatactgaaggagaaacgcaatgaacatgccggcgctgacaatataagctgatgacagccaattcatacggaacgtcagcgaagccaaagccgtcacggccgcgattatgccgagaagaccgaatggaatcgaaattcccagtccaaaaaataatatggagagaagtatacccggtataagtccttttatgtatgtaaagataagctcgtcatacatatccgcgatttttgtatgaaacgtatggcgttcacgtttaatccgcaaatatccgcaggcgagacttatgatgataaaaaaccaaaacatcgggtgcaaaaaaaacagaccgatacttttcagaagttcaattccccattgaacagacattgctttcaccgcctcaagccaaacattttaattctattctaccaaataatcattggcttgaatatctcaaacgtctatctctcttccgtcatccacaacgtcacatttgagagagagaaatctttcagatagtggtcgacttccacctcgattacaccgctgatcaaaagcatggaccgtttaatatccgtcagattgattcctaaacgtttatggtttttcattaagtaggtgaaataatgctttgcacactcctcattgatatcgtgaacacattcaacatttgtataattgaccaggtatctgctgaacagcataagaagacttagtgcttttgttgatgaaaatgtgacgtcttttgttctgtcttttagttgttccactaattcataatattttttttcacgcacaatacttgccctcttcaattgtgaacccccatttttttatccagataagcacgggtgattacagctgccgtgctgaagcgccgcaaacacttctgctttcgatactgaaatgcagctgccaaactaaaactgttctctattagaaccttcttttattgtaagaactaaaactgactgaggcaactttcaaaagtttcattttgaatacatattaactcggcataaagtctctcttctctataaatatcgggtaatgtttgtcctttataaatgtttaaatgtgaaaatttttttaatatcttgtcaaaaccgacataattatatgtcttttagttcatttttagggcatgacaaaagaaacaggagacgaaaaaaacgcctccttttcatttattttacaaataatgattttaacgccatttgcagctgtaaatcatttttttcgtcagatttcttttcattcatcagctgattcattttttccgctgtctttttatcaatgaccgctgttttatcaagcctgtaccggtcttgaaacgccagaacggcttttttcattgttttgctgaaatagccgtctgctctgcccgggtcgaagcctaggcctttcagcaggatttgagcgtgcttgacatccgcgctgttcatatcaggctgaagcggctgtttcagctgaagcggtcccgccgcaaaataatccggctggctcacagcgattgtcggagcaatgccttttttgtgaatccaattgcctttcggtgtcagccatttgtaaagcgtcaatttaatgttgctcccgtctcccataggcacggcctgctgaaccgttcctttaccgaaagaagtgtcaccgacaacgtcataatgtcccgcttcttttaacgcacccgcaagaatttctgaagcggaggcgcttcctttatccgtgatgacattgacgggatacggcttcttatgttttaaggttgagaaatattgttttttatcgccgttacgctccgcaatttggatatacggcatgtcttttgtgatgaaatgctttaaaatttgttcgacgctttgaaggtagccgccgggattccctcttacatcaaggacgagaccgtcaatcccttgtttttcaagctttttcagcgccgcggcgaagtcctgggcggtatgctcggaaaatgtcgatattccgatgtagccgacatgatgaccgcctgattctttgcgggaagcaaatacggtttcaagcgggatttccgctcttttaatccggaatgacagctgtttatcagttcccggacgctgtattttaatagaaaccttcgatcctttttttcctctgattttcagcacggcttcgtttaaacctttcccgttcattgactcgccgtttatgctgatgatttcatcattcggcttgagtcccgctttttccgccggagattgcttaaacggtgatacgataatgattttattgtctttcataccgacttcagcgccgatcccttcgaaagaagaatcaagagaatcggaaaactgcttagctgtctgcttgtccatataaacggaataagggtcgtttaatgtagacagcatcccctggatcgctccttcaagaagcttttctttatctacattttccacgtattcgttcgagatcagctcataagctttttcgattttttccattgcccggcttctttctgcgtctgttgaattcggctgtgccgccccggcaatatgagctccgccgcacatgatgctgacggccgctatcactgcgatcattttctgcttcatcgtttacctcctcttagtccttttacgaaaacctggagatagtatgtgtaaattgcaaagaattcatgtaacggcaacaaaaaaatgaaaacgcgagattgttacatatatatgggtaacgtataatattttgtatgcaattcattaaatatacaggagaatgcgatatgaaaataaaattatcgattttatccgcggcgattctggccgcaggaattaccgcctttgtctggccaaaaacagaggccaatgaaaaaacgcagacggacgccttgtatgtttctcccgcaggcagcgaccaaaatgaaggaacgaaagaaaagccgttccgcacattaaaacatgcggctgaaaaggcagaggccggaacaaccgtattgattcgggaagggacgtacgatgaaacgtttgaagtaaagcacagcggcacggccgaaaagccgattacatttcggaactatcagaatgagcatgtctcaatcagcggcaaatctgcgccaaaaagcgattctgaaactccgttaattcaaatccgcaataaacagtacattaccatttacggcgttacgcttgagaacctctccgtatcatcagaagatgcgactgccatgggaatttgcgtcaccggatcaagcagtcatatcaacattgacggcaaccatatccgaaacattaaaaccacggctgatgagggaaatgcacacggcatcgcgttttacggcacaggcgccatgaaggatgtcagcatcacaaataatacggttgaaaaactgacgctcggcgcaagcgaagcggtcgtgctgaacgggaatgttgacggatttaagattgccggcaataccattcgggacaataacaatatcgggattgacgtgatcggatacgaaggaacgtccaagcaaaacgactatgcgcgaaacggcgtcattgaaaacaatacggtgagccataactcttcttacggaaatcccgcttacggagatgaatattcagcaggcggtatttacgttgacggcgcagaacatgtggacattaagaataacaccgtttacaacaatgacctcggcattgaagccacttccgaacatagagggaaatacgcacgagatatccggattacggataacaaggtgtacggcaatgcttacaccggtatttcaatcggaggctatgacacaaaacgcggcggcaccatcaattcggtgatcgctcacaacattatgtaccgaaatgacacgaaggaccttgacggcggccagctgctgctgcagtacggcacaaaagggaacacgatcgaaaaaaacatcatgacggcaagcggttcaaggatttttatcgcaaatgattatacgaaaaacgaaggcaataccgttaatcataacgtctatcacaaagaagccggaaaagacggcatttggaattggaagaacagagaatatgattcattcacagcgtaccaaaaaggaactgcaaacgattcggattccatttatgcggacccgatgtaccgtgacgaatcgtcttatgactttacattaaagcccggatcaccggccctgcccgtcattcagtaacgaaaccattaaaaaaagccagtctatatcagactggcttttgtatttatacacgaaggaatttccggatggaagtcagacttccccatactccgataaccgcgccgatcagaatgagcacaagtgatacttgaaacacaaacggactgtacggcagaagtgaaacaaatgatccctgaactttcggggccacccaagcgaccatcgactggtacgtactcagcacgagagcgatcggtataatagaaccgaatacccccagcagcagcccttccaggaagaacggccagcggataaaccagtttgtcgcgccgacaagcttcatgatttcaatctcttttcttctggcgaaaatcgtgattttaatcgtatttgaaattaagaacatcgccgtgaacagaaggccgatgattaacgcaatcccgatgttgcgtgacaccccgacgatcttaaacagacggctgacttcttctttcccgtatgtcactttatacacatgatccagcttctcaatttttttcgcgactttcggcgtatcatgcggatctgtcgttttgacgataaacgcgttgttcagcgggttttcctgatcttgcattttcatggcctttccgctgtcgccgaagcttttgaccaattgatcaagctctttatctttagatgaaaactctacgctttggattcccgagatgtctttaatctcattctgcagcgtatcctgcgttttcttattggaagtcagatcgattaatactttaatttccacttctttttcagcatttttagccatgttgtttaaattcagcataatgactaaaaacacgccgaccaaaatcaatgtaacggtaacggcactgatggatgcaaatgtcatccatgtgtttcttccgagagatttaaaactctcacgcaaatggcgcccgagaattttaatcataagaaccatactcccctcttgactcatcacgcacaataattccgtcttcgatcgcgatgacccgtttcttcatggtgtttactatttctttattgtgtgtcgccatcacgacggtcgttccgcggttattaatctcttccagcgtcttcatgacttcccatgatgttaccggatcaaggttgcccgtcggttcgtcagctatcacgacgtcaggattgttgacgatggatcttgcgatggaaacacgctgctgttctcctccggaaagctggtcgggaaactgccgcgctttatgcttcagctgcacaagatcgagcacttcgagcacgcgttttttaataacggactgctgctctccgatcacctcaagcgcgaacgcgacgttttcaaataccgtcagtttcggaagaagtttaaaatcttggaaaacaacacctattttacgccgcacgaaaggaatctctttttcttttacagacgcgagatctttatgattaatcaatatttgtccttttgtcggcttttcttctctgtaaatcattttaataaaagtagatttaccggctccgctcggtcccacgacatatacaaattctccgggatgaatcatgactgacagcccgttaatcgcttttacaccgttcggataggatttatatacttctttcatctctatcatgaaatcacctaatcttttaattatgtcttgcagccatagagttcgtaaaaatactgcggtttatggccggtttaccaggaaacagatgaaaaatctgaaagttccttttcctcagtacacttcattatacgtcaaatttagacatattactattacagtttcttttcattcccagaccgtgaaaaaaccttgcccctataacaggcaaggtttttctgttattttttctgtgacagccattttgcgatctcagcggcttccttatcatttacaagatggctcggcatattgccgcgtccgtttttaatgatgctttcaattttagcttcatcatacttcccgccgacttcctgtaaattcggacctccgccgccttctaagtcttttccgtggcagccgatacagctttgctgataaagctcttctcctgctgacgcagatgcttttgacccgcctgaactgtcagagctttcttttttcgattcattggaaccgccgcatgccgccagcaggacggacatggtcagaaccagcgccagcagcgcccattttgatttcatatgtaagatgcaccccttcgctattataaccccgtttacgcgcgtttgaaaccctcgccgagcacctcgcttgcgtctgcgacaatgacaaaggctgactcatcaatttgtttgacgatttgtttcagttttgtgaattcggtctggccgacgacacacattaagatcggccggtcatgttccgtatacccgccgactgcggaaatcttcgtcacacccctgtcgatttctttaaacacagccgatctgacggcttcttcatgctgcgtaataattaaagccattttggagcggttgaacccgacctgcacgacatcaatcgttttgcttgaaataaataccccgagcatcgcatacagtccctgctccactccgaaaacgagcatcgcgctcagcacaattaatccgtccatgatggcgaggcacgttcccagcgacagccccgtgtatttgtgaatgatctggcccgccagagccgttccccccgtggagcctttgccgagatacacgatgccgattcccgttccgatcccgacgcctccgaaaatcgccgccagcagttcatgggtcgtcgcggcaggcagatctcttgttaaatagacggcgagcggcagaacgatggaaccgaccagtgtcttcattccgaacttcccgccgagaatgatcactccggcgataaacaaagggatgttaataatccactgcacgtaagccggttcaaaaccaaacgtttctaaaatggtgctgatcccgcttactccccccgctgctatacggttcggcagcaaaaatacgttaaacacgatccccgtaatcgccgcgccgatcatgatgtatatataatctttgatcagacggagcggcttattgtgattcacatccatgcaaaatcctccgttctccgattttctctcgatagcattttaagtcttcccggcttagaagtaaataacagccaaataccgtattaatttgctaaagcgctgttgtgaaaaatggaaaaagagaacggataaaaaaacacaccttgccaaaggcaggtgtgttcccggattacgacagtttagaacgtaaataggcgtcaatgaagatatcgatatctccgtccataaccgcctgcacgttccccatttccgtattggtgcggtgatctttcaccatggagtacggatggaagacgtacgagcggatttggctgccccagccgatttctttctgttcgccgcggatttcgtcaagctccgcctgctgttcttcaattctgcgctgatacagcttcgctttgagcattttcatcgcccggtcgcggtttttgatttgtgaacgttccgtctggcacgtgacgactacatttgtcgggaggtgggtgatccgaacggctgaatcagtcgtattgacgtgctgtccgccggcaccgctcgcccggtacgtatcaactttaatatcttcggtacgaatatcaatgtcgatttcttcattgaattcaggcatgacttcacaagacacgaatgacgtgtggcggcggcctgatgaatcaaatggagaaatccgcacgaggcggtgtacgcctttttccgcttttaaatagccgtatgcattgtggcctttaatgagcagtgtgacagacttaattcctgcttcatctcccgggagataatcaagcgtttcaactttgaaaccgcgtctttccgcccagcgggtatacattctgagcagcatggaaccccagtcctgggattccgtaccgccggcccccggatgaagttctaaaatcgcgttgtttttgtcatatggttcactgagcagcagctgaagctcaaattcattcaattccttcgttaatgacttcagctctttttcaagctcttgctgaaggtcctggtcaggttcttcttttaaaagatcatgtgtcatttgcagctcttcgtgagactcgctcagctgatgataggagttcacgtattccttcagaccgttcgcttcgttgatgacggtttgggccttctgctggtcattccagaattccggttccgccatcttttcatctaattctgcaatgcgggcttcctttgattcgaggtcaaagagaccccctgaagtccgctaaacgagaagccatattttcgagctctgccctgatttctgataattccattccattcacctcattaaaagatccggggcgccataagacgcagacccggtcatgttcgcttcatacagtcgagactattctgtccggccgcagcaatttttatatttttttccgctgccgcaatggcaaggcgcgttgcgtccgatatccacaactttgcgcaccggcgcttttttcgcttgtttggcctcatcgccgtcctgcggctgatgagccgtcgtttggccctgaacaacttcttcgcgttccagattgctttcaatctcggccttcatgacgaatttcgcaacttcgtcctcaatggactcaatcatgtgctcaaacattgcgaaaccttccatttgatattcacgcagcggatttgtctgcgcataagcgcggaggtgaatcccttgacgcagctgatccatcgcatcaatatgatccatccattttgaatcaacggcacgcaatacgatgactttttcaaattcacgcatctgctctgtgccgaaattctcttctttttcattatattttgtcatgatgcggtccatgatcatctcatgcatttcatccggttcttttccgaagatatcgctcttttcaagcgcgccttcatcaagatacgttgaattcaccagctccacgaggccgtcaagattccattcttccggaagctcctctttcggcgtataagcggcaatcgcacgctccagagaagacttgatcatgccttccacaatgtcacgcaggttttcagagtcaatgacttcaaaacgctgcttgtaaatgacttcgcgctgctgacggagcacgtcgtcatattgaagaagctgtttacgtgaatcaaagttgtttccttcgacacgtttttgagatgattccacggcgcgtgacaccattttgctctgaatcggcgtggagtcatccataccgaaccggtcaagcatcgccatcgtccgttcagctccgaaacggcgcatcaattcatcttccattgaaagataaaattgtgtgatacccgggtccccctgacgccctgaacgtccgcggagctggttgtcaatccggcgggattcatggcgttccgtaccgacgactgcaaggccgccaagctcttttacgccttcaccgagtttaatgtcggttccgcgtcctgccatgttggtcgcaattgtgacagcgcctttttgtcccgcttcttcaatgatctgagcttcacgctcatggtttttcgcgttcagcacctgatgcggaattcctttattcttcagaagtttagaaatcaattcagacgtttcaacggcaaccgtaccgacaagaaccggctgtccggtcatgtagcgctgggcgacatcctccgccaccgccttgaatttcccttccattgagcggtagatcaagtccggacggtcgtcacggatgaccggctggttggtcgggatggatacaacctgcatgttataaatattgcggaattcttcctcttccgtttttgcggtaccggtcataccagccagcttttcgtacatacggaaatagttttggaacgtaatcgtcgccaatgtcatgctttcattttgaatctccaggccttctttcgcctcaattgcctggtgaagaccttcgctgtagcggcgtcctttcatcagacggccggtgaaggaatcaacgatgacgacctggccgtcctcaacaacataatccacgtctttctgcatcgccgcatgggcttttaaagcctggttgatatggtggttcaaggccacgtttttgacatcaaacaggttgtcgatgccgaacgttttttcagccttcgtcattccttcttccgtcagctgaacgcccttcgttttgacgtcatacgtataatcctgatctttcttgagtgtgcggacaaacgcatttgcctgcacgtacagttttgtggacttctgagcttgtccggaaataatcaatggcgttctcgcttcatcgactaaaattgaatcgacttcatcaataacggcaaaatgaagcgggcgctgtaccatttgttctttatagagcaccatgttgtcacgcaaataatcaaagccgagttcattgttcgttgaatacgtgatatcggctgcgtaagcttcgcgtttttcgtcttttgacatcgaattcaggttcaggccgactgtaagcccgagaaacgcaaaaatctctcccatttgctgggcatcacggctcgccagatattcgttgaccgttacgacgtgaacgccttttcccgtcaacgcatttaaatacacgggaagcgtggacgtcagcgttttcccttcccctgttttcatttcggaaatgttcccctcatgaagggcgatgccccccatcagctgcactttaaacgggaacatgccggttacgcggcgggaagcttcacgaacgacggcaaacgcttcgacaagaaggtcatccgtcgtttctcctttttcaagccgctctttaaattctgccgttttatgtttaagcgcctcgtcagagagattttcataatctcctcttacggcatcaatgtcatttgctattttttcgtatttgttcagcgcacgtttggtcggatcaaacattttatttaaaatcccaagcatctataacgctcctctatgttcacatgcagattttgcatggaataaatgataattttctgtccatgtatacctctcattatcataacataccttttgctatttccaaagaatttgcagataaagatagagaaaaaccttccgcgcgttcacggaaggctggatgggtttattcagtcggttcaattaatccgtatttgccgtcatttctgcggtaaacgacatttgtgagattcgtctccgcgttggtgaatacgaagaaattatgtccgagcatattcatttggagaatcgcttcttcattatccatcggttttaaattaaaacgcttttgacggacaatttccgggctgtcatcttcaatttcgtcctgaaccgctacgcccgtatcagcagcgctgccgttctcgaaataatgtttcggaagaccctggtcgcggaattttcggttgacttttgttttgtgctttcggatttgacgttccagcttgtttgttgcgagatcaattgcattgtacatatcctcgttatgcacttcggaacgaagcgccagatcagtcatcggaatggtgacttcaactttagattccttatcattatagaattttaagttgacgttcacatcggcattgacgctctgctcgaaatatcgctccagcttgccgatttttctctccacatgatcctttaacgcaggtgtaacctcaatgttttctcctctgatattgtagttcatcaaagaacgcctccctttatctaaggatatgtaactatttctcttttaccccttctgatccctgctgaaacgttaaaataatgtgtaaattcggtgaacgatgacgaatggtgtcggttttatccggcagcttccgccaggattataagtatatgcggaggacgcaggcaaaagacctgccgcttgcagcaggtctagtgaagaacatacggtttgatgcagtcgtgcgtctgctccatccatagcttataatgcggcagaaagatggtttttaaaaactcctgaaaaggggcggacgggaaatcataatcatttaacatgctgaaatcctgaaagatctcgtcaaatgagcggatcgccgtctccacgcatcggcactcaatgatagacagcagaagcgcatgagaggaatcgagatgaaaaaaagcctgaatcaaatcgttgtaaatccgctcgccctccgtcttaaaaaaatcatcctgcgtgtccaacaggtagcaaagcccctcatcaatcgtaaaaagaagctggtagtaggctgacaccaaatggtaatcgttcaaacttctcaaaacactcacctatttgcgtttgtcgtaaaaacggccgtcacttgtcgtttgatgatacggattgaaatacgtattatggtagattcgttttttcttaagcgtttttatttcatttcggataccatcctgaatccgtttcacttcgccggtaatcagacggtccatcgcggccacctgctgaagcagcgttttttcttcttcggaaaaaggcggctttatgcccgcaagcatctcctcccttttctccgtaaatgccgtaacgctgctgatgagaccatcgctctccggggcgtccttcagtgcggcgtacatgttcttcgtttcgttatacaaagaaaagacattgctgttcatcaggcaaggccgcccgcgccatggctgtttttccgttcactctgcatggcctgcttccacgtgtcgcgaaattcagtaacgagcttttccgcttcatctaaaaactctccgttattctgcacgttcgcatcgatcagccggcggcggatgtaatcataaatggatgacatctgttcagatatctcaatctcccggtttaacgtgatgctgagctcttgaatgatgttttgcgcctttacgatattttcatttttggcttcaaggttgttttgcttcatcgcctgcctggccagcttaatgaatcgcaggcagccgttataaagcataagggtcagctcttccggagcggctgtaaagacggatgtctgctgataagcagcaaaaggattatttattgccatttttataaaacctccaaggttatgatgttgaagatcctaacattgacgtgagatatgaagattggctgttcaatttctccaatgccgtatccagtgcgctgaactttttataatatctcgtctcgatgtcatccagcttcgttttcatattggaaatatttgtttctatttcatccaggctttttccgatggcaaagctggttgataccgagctttccgtacccgcctgttttgaaatttgaatctgcattttgtttaatgtgtcttttaatctccgggcaatcccctgttcctccgggtttttggttttcgctgtatcagggctgtctgcattaaacagtttagccacgagagcaggattctcggtaattttctgtttcagtttcgcttcgtctttaatgacaagctttccttgatccgtataactatcagacgtctcaattccgaaatctgcaagctgatattttttcccgtcaatcgtaaccgttgagtacagatcaagccgcatctccgccaaaccgttctgcagcgtgctgtcgctccgtaataaaccgcttttggcctttgcttcccactgctcaatctgcttatcggtcatcgcttctctttgttcatcggttagcggcttataatcacggtattttgattccgacgccttctcgtttacacttttaattaacgtattgtatttatcaacgaaatctttaatgttgtcaaaaatgccgtccgtatcagtcgtgctgttaatcgtaaccgttttattgctgtccgtcacgctgttcagcgtgtatttgatgccgttgatcgtaaagttattggacgtttttgtcatttcaagcccgttgaacgtaaacttcgcgtttttcccttcggcattggccgtcagttcatttgttgcatcatcaacggcaaaaccgagctgatctttcagaaagcttttggttgcgtcatcacctgctgaaagggtaaatccttcccccgttttattggaagtgaacgcaatcgtatccacataatccgtgccgttggaaattttctcttttaaagccgtcaccccaaggcctgagctgttcagtttagaaatgacatcgtcaatcgtatcggttgcggcgatcgtgacgtttacctcagtcggcttcgtttcacccggatttgtgacattgaatttcaatgtttggctctgacctgaagtgaaattgatggcccctgatgatttataagtcgtcggtgtggccagctgctgtacagacatgctcgttgaaatattctgttcagcactgacagccaccgcgctgacactggaatccgaacttgttactgtttttttattccagtttgtggacatcagcatattattaaatgtagtagaatacatgtcggcaatctgggtattcacttcccgataagcatcgcgcttccattcaagcgtctgcttttgctggtttaatttattaagcggctgcttttcggcatccatcagtttttttaccagagaatctacatcaagaccggaattaaggcctgtgattcttgtgaccatatgtaccctctccttttcggcgtttagtcgtagacggctctatgacaacagtgagtttccgactgtttatcatatcacagctccataaatgtatgatcttattcttatatcggtcatattaaaaggttttcaataatttaactgcaaaatataatgtttcattttgtcaatagggttctttggcatgatgaaggggaaaatagctgaagaaataaaaaaagaccctggagaaccaggatctttccgtcattaacctttaagcaattgaagaacttgctgaggctgttggttagcttgcgcaagcatagcttgagaagcctgagtaaggatgttgtttttcgtgtactccatcatctcagaagccatgtctacgtcacggatacgtgattcagcagaagtcaggttctcagaagaagtaccaaggttgttgattgtgtgctctaaacggttttgaaccgcaccaagtttagcgcgctcgctagatactgtgtcgatagctgttttgattgttgtaagagctgaagacgcagctttagctgaagatgagatgtcgataccttttgttactttagaatctgcagctaatttttcagatgcaataactttaccgccagcatcgtaataaccagctggtttatttgtagcatcgtctgcatccgcccaagtagcagtgcttccgtcagttgctgtaagtgtattttgatcaccagatacagtataagtcgtaccaactttcaggctttcagagtccattttattgatagacaggctcattgtttggccttcgttagctccgatttggaacgtaaggttttgcgcagttccgtcaagaagtttcttcgtattgaactcagtgtcagtagagattcttgttacttcagacgctaattggtccatctctttttgaagctcagaacggtcagaatcagtgtttgtatcgtttgccgcttgtgtagcaagctcgctcatacgctgaagaatgctgtgagtttcgttcaatgcaccctcagatgtttggataagagagattccgtcttgagcgtttttagacgccatgtctaaaccgcggatttgagaacgcattttttcagagatcgcaagacccgcagcgtcatcaccagcgcggttgatgcgaagacctgaagataatttttccatattttttgcagcagagtttgaacctgcattcagctgacggctagtgttaagagccgcgatattgtggttgattctcattttgtatttcctccctgaattgtttttcgcacgtccttgtgcatttgcgcagcgtcattctgaagaaaatttttcctctcattggctacactatatatatcggacggccgcttccattgtttatattgaaaataaaaaaaacctcactttttttgtgaggataagttaagtaataaatcagtattaaaagatacagctctgttgttctcttccaggatcgacaagtagatttctttcctgtgaatatctacgtgctgaggcgcttcaattcccagcttcacttgttctccttcgatggcgatcacctttatttcaatatccggcccgatctgaatggactcattcacttttcttgagagaactagcatgatcctcctcctatcagatgttttgtttcataggaagcatcatgtaaaatgatttgtttcgccttcatttcctttttattgacgataatcggcgcttttaaattggcggtcgtgttttcaaaaggctcttccagcgttaaaatcgccatcacttcgacgtcctctatatcttcaatatgcaaaagttcaagcgtcgcatggtcaatgtcaaattcgtaccctttaaagaaaataaacggactggcgacaataaaggcgatgtgctcctgtttgacagactgcagcgccaaaaacggtgaatcttccgacaaaggaagaacaacaaattgagtctcgtcattaaatcccggcaggccgttttcaaatgagataatctgcccttcgtctattctgatttctccgtgatattttgttttaattatcatgcttcacaatcctttaccactttcatcttttattctgcgttgccatcgtctaccgaaatcgtcaccttagggacttgcatcatatcaatctgaactttccccggcgtataattccatacaggtttattgacggctgcttcaattgaaggtttgcgggcttcaatatcaatcgtaagctttgaaggaatgcagtcaatgtcgacgagaaactgcgcaggcagaaagtcgctgaattcgccgaatggatcgggcggtttgacatctgctgcctgccgggccatcacattgcccgttttcttttcgatagccgccatttccttcccttccctgactgtttttgcaataaactcgctgcaggcttccgcacctttctgggcggcttcagcgttcagcttttcaaatgatttgagattcaagttctcccacgccctcgtctgatcaattgtcagtttggccggcgtactttcaatgtttagctctgccggcggctgctcgatttccaagtcagcgggcggctgttccatctcgatttcttccttttgaaaggttataccgattttagcaggcacactgtcaataatcaatctcggcatctgcacagagacccctcctgtttatagtattttagtaaaaaaagcgatctccctggtgtgagtcgcttttttatatattgaagacgatcagttctattatttcaggaagtcgatcagtgacggctgaatgatattcgcattcactgacagcgctgctctatggaccgtctgctgagataaataatcaacaatcacatcttccatttctacatcttcattatccgacaatactttttcagcggttgccgcttgtgattccaatctcgtctgaatgagttccaaccggtttgtgcgtgcgccgatattggatttttcagcattcattttgtcagtaaaaccgtcgatatctgacagaatttgatttgaatctgcttcggacagcgtgcctttgcttaaagaagcttctaaggagttgagaaattcaaatacattatctccattttgtgcgacgcctccgaaagctgagttcggatcagaattcactttcaacactgctccgttcgagatgttgatgttaacatccgaagcacctgtataattctcatagttgtacgtatatgtgccgtcggcattttcagtgatcggcgggacatctgaatttgttccgttaaacagataacgtccgtttacctgagtattcgcgacagaaacgagctgctttttcagctggccgatttctgtaccgattgctttcaattctgtttcaccgttcgaatcacttttcgcctgaaccatcaagtcccggattttccccataatatccgtttccgagtttacgcttgattccgagttttccagccatgtaaagccttgcgaaacattccgctgatactggtttacctgcgcaagctgagtacggtactgcattcccttcattgcaacgaccggatcatcagaagcttttgtgatttttttccccgtagacacttgctgctgaagccgatcgagcttgtcataacttgagccgataaatcgaagagaattttttgcgatcatcccttgagttactctcatttacttatctcctatcttcctccggtgcccataccgttaataattttatcgaatatttcatcctgcatcgttatgatccgcgcagccgcattataagcgtgctgaaactgaatcatatttgtcatttcttcatctaaagacactgcactgacagattgtctccgttcatcggctgaaagggtgttgctttcagagttgttcataagattggccgctttttgtgaattaacgcccagctttccgataagggattcataaaagtcattaattgtagtggtttcaccgttaatagtcagcttgctgttctgtacggctgcaagatttgtcgcgtttgtgccgtcacttttttctccgtttaacgacgctgcgatattatcagtagacgcaaggattttgtcactgacttttattttcgctgccgcaccttttgccggcaccgcttcaccaccgctgaaatcaaaaaatgctgcaccctgttcgcctgtataggtcttccctttttcatgaactgcattaaacgcgtcagcaaaggacagcgccatattgtcaagagccgtcagcatttcaggataaagacctttttcttctccatttgacatatagccgtatgattcaataagacctaagagtgagccttttccggtaaatgcatccgcattgaccgtattgctgccgactgacacactcgacacgaggccgctgtccttatcgtagttgattttcatttctgaaactgtttttgtgttaccgtcgagcagcgtaccgagagaattgttgtttccgttcagcaattcgacgttaaccgtgccctcagcagtcgccaaggcatgtccgcccgacttattatatgaaactttaatgtttgccatagaagataattgatcaatcaatctgtctctttggtcatacaaatcattagggagcataccgctcggctcaactgccgctatttgattgttaaggtcattcagctgattgagaacggaattgacctgatccgctgtgttatccaggttctttttaatatcaccctgaatgttagtcaaagaggtagatatatagttaaaactttcggcaagagatttcccctgctcctgcaaaactgagcgcgctcccgtattttccggattcgtcgccagatcctgaagggcattccaaaacgaactgagcgatccgtttaatccgttatcgtcaagctctttcatgacgccttccatttgcgacaatgaattggaacgggctgtatagtaccctaattttgtattttcagttctgtactgatagtctaaaaaactgtctctgacgcgctcaactgaaccggcttttactcctgttccgatttggccggccgtcagatcactgttttttgatactgcgggataagggctcgtcgattgtaatgtgacgcgctgcctcgtgtatccttctgtatttgcatttgcaacgttatttgaaactgtgctcaatgcagtctgctgcgcactcaatgcacgccttgctgtttccagccccataaaagtcgatggcattgaaaatcctccgttctaagcttttgaatcgaataatgtcaaacggctgacaggcttgcgcgccgcttgcggctctttataattcatattctctttttcacccggcatgatcatatcgaatgccccggagatgaattgtaaagcctgaatcgtgagctgtttgttcatctcattcacttctttcatacggtcaagaagcgcagacaaagagtgaaataacccttcaagctcctgtttttcactgcctgaagttctggagatgcatgcagcaattgtattgtcctcaccgcggctgagaaactgagaagttaacctgattcgttcttcctcagtctgcccgattgcctgaatatacttttgctctttggtcaatatgttggagagctcttttgttttacctgctttcagcgcttccgttttctcctcagacagcgtgagcagatgttcatgcagtgcgcaaagtcgcttcagttgatcaataattggctttgctgacattggctttctcctttttattgctttttatagaaatttactatattttcagcgatgctgtttgaatctattttatatgttccgctctctatatccgctttaagctgagcgattttttcctgtcgtgttttagtgaccgcatctgacgcattttgaagctcttttgcatgagaagaaatttccactttgtccttcggctttgcagcctctttttgtacggcttgcttttcgtaatttttttggtatggattaacggattgtgttccgtactgattgattttcataggattcctctcgctttctgttcgcagtctaattcttttatcgactgcgttatcagttagtttagggaatcaggtgtttttggtattataggcatagtatgtgtcttttgtactgtttttatcttcgaattcagcggctgttttttggttcatatggtctaattgcgactcaatatctgtctgacaggacttgcaaaatttccccgtcctgattggatttccgcacctttcgcaaggatatgccaaattcggaagctggctgatctgaatccttttttgtttgataaacttgaggatcagctcttcatccacacctgtttcctcagtgatctgctgcatcgtcgactgtctgttgatctgctttctcaaaaatttatagacggtttcaaatgctttttcttcttctttaatacatgcctggcacacggtctgcaggttcgttttaaaaaataaagcattgcattttggacaattcgccaattcacccatcgtattaactcctattccttctttaatctgccttatatttctatcaattatatcggcagaaaaaaagaatgatttagctcctgattaaagtaaaagaggagaccgatgacgctttgcccgctgtcagcaggacttcggcggcttggtgaagtgtggcgcccgtcgtataaatatcatctattaaaatgacgttcataccttcggcggagttttcggctgctgaaaactttttttctgcagacagcctatctgttttgctctttttggattgtttttcgttgttcagtcggatgaggggggaaatgacaggcattccgagcagagaggccagcagctcggattgattgaatccgcgttccgccagccgttcgccgctcagcggaatagggatgagagtatgtgtatttgatggatatgccgctttaaagccggcagcaaagtcacgttcaaatgcttgaatgatttttgcatcacccctgaatttaaaacgggccaatgagtccttcatcgcatcattatataaatataccgaacggttttgccgcagcaaaaagcgcttttccgtttttgattcccgggccgcacaatcagcgcatttttcatttgactcctgaggcctcccgcatatactgcatacggggccttcaattttttcgaattggctgctgcatatgctgcatacctcttgctcgggcgccagagaaaatagagatctccaagtcaatgaacttgaaattggtgagtcacacaataaacaattcagagatattacgctccttcccgagtttcacagaactcgcttggattaaccgaaacaatcgccgctgattcagccagaatgacaagcagcgccgtatttttctgtttatcaactatctctgcttttgcataagcaactttctttttatctgtaacatatgccggttcagcccggttaagtgaaagtgccagtacatcatttttgcatacccggcatgtgcatttcatatgaagctgagacatatggcggtcgagaagttcctttaatacgatttcttttgaattgacaagcatgctgacagctcctcataggaaagtatgagtatactgtatcacgttttctgaaattaactagtccaacaatttacttttttgtgccaatttgttcatatgttctatatgtttttttgcttttttcattccgtttgtaattccgaaatgaaacatgacgacatcaccgctgaaatgtttataatgccttcccgttctgcccgcgatctgtacgagcgcgctctcagtaaagataggtgcttctgcgccgaggacacatgtctgaactttgggcacggtaacccctctttctaaaatcgtagtcgttaccagcaggtcaagccggccgtctctgaaccgtttcactttatcctttctgaatgtgtcttccgcatgaacgccttctgcccgtatgtttaatttctgaaaataatccgttgtctttttcaatacgtgtacagacggaacgaataagaaaaccggcagctgtgattgaagtttttggcggacccaatccgttacagagcgcggcagttttcctttctgaagcttcttcttccaattgccgcaccacaaaaaacgcggctccgggaggggtttccgatgatatctggccggtatgcggacgcttttcagcaaaccggcttcagccttcttttttaatgtgtctgaaggagttgccgttacataaacaagggcgctgtttttcttcctcgctttatcaacagcgaatcttaatgtctcatcggctgaaaaaggaaacgcatctacttcatctattatcatgacatcaaaaatgtctcggtagcgcatcagctggtgagcggttgaaatcattaacggggtcagacggcctttgtcctcgctgccgccgtacaaagcagaaacttcgactttctcaaatgcttttttcagtctcggcagcagttcaagtacgacatctgtacgcggagtcgcgacacagacgcgcaaaccgtgattcagcgcaaactcgatacccggaaacagcatctctgttttccccgatccgcaaaccgcccatactaacagctcttgtctctcttttatcgcatctgtaagcgcggcggccgcccgcttctgtccgtctgtcagtgttccttcccaagaaagctttacaggttcccagctgttttcatgggcttgattccaataatataatgatgtcagttcatcagcccttcccatcatgacacaggcacggcaataggtaatctgccttttggcagagggcgcccaaaatgccgcaaagctggcttgatcagactgaccgcatcgttggcagacgtaacggtttttccggcggatgattgacggctcgtccgttatatattctttttctgtaaaacgcttgatgcgctggtctgaaaacggtatctcagatctcaataaatgccggccgtaaaagaaatcccgcacctctgaaaattctgaagcaccttcggacatctccctgcctcctttctgctcaaagtatgccttgtcgggaacccacttgtcgaattgcgaaaattaaaaaataaaaaaatctccgcccttgaaaacggagattttcacttagtttttaaagcaccagccgattccgatggcgccttcgcccaaatgggttccgatcacggcaccgaaatagctgttatagaattcgacatgaggatatttaccgcttaactcctgtataatagccgccgcttcttcttccctgtttgcatggatgacagcggcccgcatcgggattcctttacttgcatcctccccaaacagctcaaaaattctcgaaatcgcttttttgcgtgtccgaatcttctcaaaaggaacaattaccttattgtcaaaatgaagaataggctttacctttaacagaccgccgataaaagcctgagcactgcttagacgcccgccccgctggaggtgtgataaatcgtccaccataaaatacgcacggactgtttttttcatttcttccagctcttttataatctcttccggtgagtcaacaccgtctttaatgagctgtgctgcctttaacgcataaaacccttgtgccaaacaactgatctctgaatcaaagggataaactttaatatgatcaaccatagtgtttgccgaggcggcgctgttatatgttccgctgattccgctggacaaatgtatgcttatgactgcatcatatgttttgcccagttcttcgtacaatgcgattaattcaccgaaagaaggctgagacgtagtcggcagctcatcatgattttttacttctttataaaaacttctccagtcgagttctgtttcttcgcggaatgttttttcaccgaaaaccacttggagagggatcatatgaatatgatgttcttctctcatctctttcggaatatatgctgtactgtctgttacaactgcaatcttcatcactttacctgccttattaagtacttaataagtattttaatagatatgcagctgtaaaaaaagacttgccataacaggcaagtcttctcacacatgactaacgcatctctacccagccgtttttaatggccacgacaacggcttgtgtccggtcattaacgttcattttctgcaaaatattactcacgtggtttttcactgttttctcactgataaacaatgattcaccgattccgcggttgctttttccgtctgcaagcatttgcagcacttcacattcccgtctcgttaatatatgtaatggtctccggatttccgggtaaacctcatgctgaggatgagcagaaactccacttgtcgcaagacggcggaattcgttgacaagattgtgggttactttcgggtgaaggtaagaaccgccctcggctaccactttcactgcttcgattaaagtatctgcgtccatctctttcaggagatagcctcttgcacctgtttttaaagcatgagtcacatagttttcatcatcatggatggagaggataatcaccttagattcagggtacagctcaacaagctgtttagtagcctctactccatttacattcggcatattgatgtccattatgacaacatcgggatgataatgctcgacgattcgagccgcctcatctccatcgtcaccttctgctaccacttcaaaggtaggttcaaaatccaatattctttttacaccctcacggaatagttgatggtcgtcgataataacaatatttactttagtcacacgctacgcctccttatcctattgttctatatacgccgctgttcggtcaatatgtcttttggctctatttaacaaattataggccgagagataacggaaccttaatcatgataaatgtcccaagacctattttagagtctatcgttatcgttccttcaagcagatctactctttctttcattcccagcaagccgaatgatttgtttttcttttgtttagcatccttaatatcaaagccttttccgttgtccttaatgatgagaacgacaaaatcagcggttacttccacttttactgtaatttcctctgattctgaatgcttgagtgcatttgtgacggcttcctgagcgagacggaaaagcgccacttcaaattgcggggcaagcctttggttctctgtgtctccgatacactgaaaatgtattttcacctttccgttgtattcttcagttgtataaagatattttctcagtgtcggaatcagcccgagatcgtccaatgccatcggtcttaaatcatatataatccttctgacttcgtaaagggcattccgcacattctgccgcagatttctgatttcctgaaatccgtcctccgtgccgcggtcgcggaagatccgttcaattaattccgatctcatcatgacatttgccagcatttgcgcgggaccgtcatgaatttctctggaaactctttttctttcttcctcttgggcttcaatgattcttaaaccgaaatcttgtttagcctgcgcatcggcaagaagaagccctacttggcgaaggtcttgattcaggtaattcagaacgacggttatttggctgaccaatgattctgaccgttcaatgatttcctgaagccccaaaagccggcgttctaaatcatctctgcgctcccgcagctgcttttcacgctgttggatcatcgtcagttccacttgaagtttgtgcgccttttcataggcgttgcgaatttcttcttcgctgaacttatggaaatttctgcttacttcagacaagcggtttcgtgcgtgccgcgtatgaacttcaagtttgtcgcccagctcaatgacttcgtagacctgctgtttgatctgtttgagttcttcaaccagctgctcatattgctggcgcgactgctctccgatttgaaaaacctcgtccttgctcccgtccacggttttcagcattttcataagtatagaatccaaaactttggagtccatcttcgatttattcatctgtctccctccgtaacggtgttgttatgtatttttattataaatgtaattgaactgcaatttatgtcgaattataatgaaagaatgcgtatattctagaaaaaaacatttttatatagtatcttactctttcatgataccaaaatatgcgcaaaaattctaaagtctgttcgaatttgtagaaacaagtcttttaatgcttgtcaggagggtccagcaatcatgctgcacagctatttaacagttaaagaaacgggtgaacatgagattgtgattgaaaaatcgcgttttatctgtcacctgagccgtgctgcttctgaagaggaagcgcaggaatttatacaaaagataaaaaaacagcactggaatgcgactcataactgctcagcttatctgatcggcgaaaccgaccatatacaaaaggcgaatgatgacggagaaccaagcggcacagccggcgtccccatgctggaagtgctgaaaaaacgcggtctgaaagatacctgcgcggtggttacccggtatttcggcggaataaagctcggtgcaggcggattgattcgtgcatatgggaagtcagtgtctgaaggcttaaatcatataggagttacggagcggaagctgatgcggattatgcatacatcagcggattatacgtggctcggcaagatagagaacgaactgagagaatcagtttttttactgaaagatatccattatgcggatcatgtcgaatttgaaacgtacgttgaagaaaaagacaaagacgagtttataaaatggatgacagagctgacgaacggcaagagtaagaatacagagggagaactgacgtatttagaaacagacgtcagccctaaaggagactaatgtaatggctgaacgtgtaagagtgcgtgttcgaaagaaaaagaaaagcaaacgaaagatcatattcaaacggattttgctgctgcttaccctcgttttgttagtcgctgccgggtttggcggatacaaagtatacaaaacgatcaatgcggcagataatgcatatgatgccctttcccgcggagacaaatcaaaacttcgggataaagtcatcgatatgaagaaaaaaccgttctccattttgtttatggggatcgaaaattatgccacaagcggaaaaggcggacgatcagactctcttattgtcgttacccttgatccgagaaataaaacaatgaaaatgctgagtattccgcgtgatacgcgggtgacgcttgccggcgatacaaccggtaaaaaatcaaaaatcaatgcggcttttgctaaaggcggggcggatgaaaccgtctcaaccgtcgaagacttattaggcataccgattgataagtatgtcactgtcgattttaacggctttaaggatgttattgatgaagtcggcggagtcaatgtaaaagtgccttttgacttcgacgagatgagtgacgtcagtaaaaagaaacggatctacttcaagaaaggaaacatgcatttgaacggtgagcaggctctggcttacgcacgcatgagaaagcaggataaacgcggagacttcggtcgtaatgaccgccaaaagcaaatcctaaatgcactgatcgaccaaatgtctaaggctggaaatattgctaaaatcgataaaatcgctgaaacagcaagcaaaaatgtacaaacgaatatccgaatcactgaaggactcgcccttcagcagatttataacggctttaccagcaaaaagattgatacactgaccataacaggatcagatttatatttaggcggcggcggaaccgcgtctacgggcggaacgtattatttccagcccgatccgaccaatctcgaaaaagtacggcaggaattgcagaaacacctggactacccgtccggaagcagcacggcgtccgatcctgcttctgacagcaccggaacggacagtacgactgattcgacttccgacagcacaggaacaggcggtacggctgattcaacttccggcagcacaggaacaagcggcacaaccgattcaaccaacggtactgctggtgcaaacggtacggacagcacacagtccggcggcacaacaggctattaagagtaaacccgatcctttgagcaggatcgggtttttttatataataagagaatagcagaatagcagaatccacaaaaaagcagaccattcgcatgatctgctctttttaatttttctttaccaatctcttgtaaaacttggtaaatggtttaaattgttcatttactaaccctgtgacctctgctatgatttgcataaatacaatcaatacaaaaataataaacagcgaaagccatatggtcgcgcttttcagcaggatggcactgacgctgaaaataaagccgattaaataaatgataatgacagccgtgcggtgtgacagcccgaaggccatcagccggtggtgtatatgtgacttatcaggcgctgagatcggctgtttgtttaaaatccgcctgatgacggcgaatgtcgtatcaaaaatcggcacgcccaaaatgatgatcggaatgatgatactgaataatgtaacacttttataaagacctaataatgagagtactgagatgacgtatccgagaaagagcgatccggtatctcccataaatatctttgccggatgaaaattataaaataaaaatccgagtgtgcttcctatcacgacaagtgaaagtgacagaataaggattttccctccggataacgccataacggcgatagtggagagtccgatgaccgacaggccggcagcgagtccgtccaaaccgtcaatcaggttcatcgcgttcgtaataccgacgatccataacacagtcagcgggtaagcgacccatcccaattctaaacgttccgttaaaaacggtacggagaaaaagtccattttcagtcccgtgctcacaatcataatggccacggccagctggacgaaaaactttacctttgcgcttaattggtatttatcatcaaggattcctaaaataacaataataaacgcacccactgtaatggcggtcattttcgtttcattatatatgccggccgcgagaacacccgccgctacgccgataaagatggccaggccgcccatacggggcattattttatcatgtacttttcggttgctgggctggtcaactgcacctattttgatcgcaattttttttacgataggagttaggattaaaaccgttagcagagagacaaaaaacgcaacaactatgcgaaacatgcgttcgtcaagcataaagaagtctcctttggaattatatgaagtcttttctgatattgaaccgttccttccattataattcttactagttattataacaagcatcatcaaaaagaaacacgcaaatcaaaaaatgcgctttcccttttaatgggattgcgcatttttcaatatacccgtgcattcgagcattcggccgaataaaacattccaatcccgtctccgggccaattcacggcgcaaagcctcatatgatccgctgcggtccgctgccagaagcgcgtcgcaggccgcgatgaaatctgcggggtcactgccttcaacgtattcatagacgaaaggtcttttgatttttgacgtagaagaaaggttgcagccgacaactggttttccggcggctaaaaattcaaaaagcttaagcggaaataccgcgtcattataaggtgaatttttatacggcatgatgccgatgtcgacaagctgcatataggacggcacttcattcggcgcggcaggtcccgtccagatgacattcggacgctccagaagcgacttgaaatccggatcgtcctgagccgtgttcgggcctaccaataaaatcgtccagtcaggcctcacatctgccgtttccgccataagcgcaaaatcgagcttcggtttgattccgccgataaaaccgagaaccgttccgttccgtccccgtaaaatgtcttcatccggctgtttattttcccgtgaaaacaggtcatattccactccgttttcaatggtgaacactttctggtgcggattctccagcttttttccgacctcccggtgcagacagtcagatgtacacgtaatggaatcggcacgctgaatgattctcatttccgcctgtttaatgatgtttcttctaacatttgacagcaccccggatcggccgctgatcggagcggcccacagatcactgcaatcataaatcacttcatcccaaggaaacagatctgccagaagcggaaaaccggggaaggtgtaccataagcagcagcgggccccttctccttcttccttcagcatgttcaccaatggtgaaagcttatgcctgtagcacatgtctgtatacctgccgaagcggaaagctttttgccgcatgagatcctttacagtgaactgccggattccctcggcgatcccggccatctgaccatcattggctcgcggagacgggcatacccaaatgacgcttttcgtttctttttgccgggcgagaaattcagccagccggtgccgtctgtatctcagccggtcatgcccccattccgccgctccgacgattacgtgaataatcggttccaccttcatcacccagctcctctgacgcctacagtcttttcaagaccgcgttttttgcatattgcataaaacaccacgaagccttgataaaatgcaggcgctcaatttctctataaacaaaccacgttttttttgcggctttccacttgttgcttgaaatcgaattctgcacaagcctgtattctgaaaggcactcattcaggccgtaagccgtaaatccccttttcagcagggaaagccatgtcgctaaatcctgccgcgttctgatatcaggcatttgaatctgccccgtctgctctctgtcaatcatgaccgttaaacatccgataatcgtgttttttaaagcttcatcatatgacaggctttcaggggcttgaatcgttttgtccgtcggcgttccgtcctgctccatgacgctgtagcccgtaaatgaaaaagcgcaggaccgctctgccataaacgcaagctgtttttgaagcttttcctttttccatctgtcatcgctgtccagaaatgcgacataacggcccttggcatgtttaagggctgtatttctggcagccgcggctcccccgtttttatctaaataaacgacgcggatccgctcatccttttgttcatattgccgtaaaatatctctcgttccgtccgttgaacaatcatccgcgataatcatttcccaatgcgggtggctttgatgtaaaacggactgaatcgtgtcttcgatatattcacttgcattataagacggtgtaatgacagatacgaaaggtttccagtttgtcatggtcacatctccatcgcagatttttacaaggactctctaaaaaactcaggaatgacaatgaacataaatgcaactgcaatgccgattaaaacgcccagaaccgctttctttttcggcggcatgccttgtcccgccgtttcattcatcggctctgaattgatgatgccggccgctttcaggttcagctgcgtatttttcaattcgtataaaaatcgttccttatccactttggcgtccgcgctgacggtttctccttcaagcgcagcaatactctgccgcactacttttgcccgtttttcaaacaggtcctgatcattcttcagaaaagtttttatgacggcttgaaacaccgattcggtctcctgtttgttttggccgctgtagctgaccgtgatcaatgaatctgattgtgtttcgacagtcagtttacttttcacggccgctctttcttcgtctgttttatcaggcaaagcctgctttaaaaaggcatcgctcgtcaaaaggagcgggatttcttttgtattgttataaagcggatgatcataatttcccgcggcgatcgcggcttctgatgtaaaactgctgcccccgctgatttttgacggcaatacatatcccgctgcccctaacacaacgggcagcgcaatgatccaaatgatattctttttgataagccgggttattcttgtcaacatatccttcatctcgcatctccctgtttttcatagtacgccgtgacggcaggctccttttgtaaacgcctcaatatattgaccgccgcgatcacgagcgagagaaatacccagtggaaaaataaatttgatacggagcttgggctgatgctgcttaccaaaaaaccggccatcgccgtgataagtccttctgtgatcagtcttgactgattttccgattttctttcatgacatttataaagtgtccaaaaaaggaacaaatagactgtcaggtaaccgagcatcgtaagaacgccgaagttcgccataatctcgacgagccagttgtgcacctcaactacgccgcccgtatcataaacgggctccgcttttaaatagtaagagacgtttccggcacccactccgaacccccaggaatcaatcacatagtgaaaggcgttttttaaaagattcgccctcgcaagattggaaggaagcggttgctgtcccggcatcgcctgcggagctgaaaacagattcaagacggcattggtgatacggcccgcaaataaaaccgcaaacagcgccgcacccgctcccgctgcgtacagcgcgagttttttcaacagggaaggcagcatgatgaagacgtatacagccgcccccgcgcatatgcccagcagactcgcgcgcgaaccggtcaaaatgattaaatacaaagcgcagatcgcaaagagcaggctgacggccttcacatagccgtttttcatatttttcaccgccgctgcatacagaaagaaactgatgcacaaaaacgttgcgaaatcattttgattaaagaaaacggacgtcggataatgctgtttgtactgcgggccgttataaagcgtggagctcggcagatggtggtgtgtaaaatggttgtaaaagccgatcgccatcacaaaaatggtcatcacaagccatatgccgtaaaaaaccatcagctgatcaaagcgctgaatgaacatgacaataagataaatcaaaaacatgcccattcccattaaagctaaatatttaatcccgtacgtcacggattttgcccacaataacgataggagaccgtatgtaaaccataaggcgaaaaacatcagaaccccttttacattcacccgattccatctgtcaatatgatggcggtttgtcaggatgccggcgacgtgaagggcgcccgctccgattaataacagccggtatataaataagctgaaaaatccgagatggaccgcaaagaaggcctggtttaaaaatgtacacgcgatcagtatataaatgagccccataaacatctgaccgtttgttgtaaaggcggatagcaaagcaagtccggcaaagccgatcatggcggcaaacagcagcacggtgatttttccgaagccggcatccgccctgaccgcctccagcatgatgaatcctcctgtaatgagagcggcaagcagcacaagaacatgtgccgctgaacgtttgatactcacatggcaaacccctttccaaaaccggcagccgagccgggctgccgagagcctgaagacaatctttttctatcttgccagttcttttatttgccgatcggcatgaaccgccggacgtccgacggaatgataagtgaatcctgaaaccctcatatactccaacggaaacatatttctgccgtcaatgatgaccggctgtttgagcagctgcttcactctctgaagatccatctccttgacttccggccaatctgttgtaatcaggcatgcgtccgcgtttttgatggcactgtacagctctgtgtgatattcaatgccgccgtctcctaatatcgctgacgcttcgggaatcgcgatcggatcatacgctttcacgtgagcgccctgctctttaagacttgtgatgatatcaagagccggggcggagcggacgtcatttgtgtgcggtttaaaggccagccccagtacggccgcggttttcccttttaagggaccgatggcgcggttcaatttttccgtaatacggacccgctgcttctgattggtttcaatgacggcttccatcatttgaaacggatagccggcggcgtttgcgatatgcaataaagccgttgtatccttcggaaagcaggatccgccgaatccgatgcccgcctggagaaatttattcccgatccggctgtcaagaccgacgccttctgacacgtgggaaatgtccgccccgacacgttcgcaaatattggcgatatcgttaataaaagatattttggcggctaaaaaagcatttgcggcatacttaatcatttccgcgctttcaagattggtctttacgatcttcgtacggaacggcttatgaagctcttcaatgaccgaagcggcatgttcgcttgtggcgccgatgaccgcccgctccatctgcatcgtatcccgcaccgccgaaccttcgcggaggaattcaggatttgacgcgacatcaaacggatattttccctttgacgcttcgctgacgatttggtaaacgagctttcccgtcccgaccggaacagtgcttttggtgacaatgattttgtatccgttcagctgttctccgattgtttgcgccgctgccttaatgtaggtcagatcggcttcacccgtctttgacatcggcgtaccgacggcgatatagatgatatcagcggctttcacagccggctcaatgccggccgtaaaggataagcgcccggcactgacatttttttcggctaattcctcaagccccggttcatatatcgggatgactccgttttgcaagcttctgattttcgcttcattgatgtcacagcaagtcacatgatggccgatttccgcaaaacaagttccagatacaagacctacataccctgttcctaatacagcgatttttttcacagcttcatccctctttcgaaaggttctcctcttgcccggcccggttcattacggatcggtatttctctttcagcgctttcgcgttttggcttgcgtcaaaatacgtgcggacggtttgataaagttcctcggctgtttgcggcgtccaagcctctccttcgtcatattgcagaatcgattctgccagcgtctcaggtgaacccggcttgatcagcaacccccggtgtttcccgaataaagaagccaatcctccgacatcggtgcagatcaccggcaccttcagagcgagcgcctcaatgaccacagtcggcatgccttcgctgtaggacggcagcgccattacatccgaagccagcagatagtcctgtaccttgtcgttcggcacttgccccgtgacgatatgagcggcttcacgcaatgaagatgcggcgggaccgtcaccgacaaagacggcttcatatctttcatccaatgactgagcggcttttgataagtcgaaaacacctttctctttgacaagcctgccgatgaacacgatcagttttttatccggaggaaggccgagccgttttctgacggcttctttcgtctcgttcctttttcggaaggcgtcaagcgtgatgccgatcggaagcacggtgcactccgcttcgataagctttttcatttgttcccgcagactgccgctcacagcgtaaatatcggctgcttcccgcaccgcaaatgtaaatgcgcgatgagcgcttttgctgtaatgcggatagacattgacatcactgccatgcaaggtcagcacatacggaatgcctaaagcctttgacacaatggcggccgctccgcctgacggcatggcgaaatgcgcgtgaatcagatcgggcttcaggccatgatttttaatttcggaaagaatggattccgccattcttttatgcggctgcgcccatttcagctgcccgggaaccgcctgataaaacggccggtggacggacacgcctttccgccattcatgcgccggcctgatatccttttgccgatacgtctttttcagcacccggaatggcgcggcgagtttcggccgcggacaaatgacggtcatctccgcgccaagccttctcagttcttgggcctgcgtctcatgaaaaacgccttctcccggcttctcactgctcggatagacacttgtcatccacaataccttcatagcaaacgtccttttcttaatttacttttcatatgcggataagcttttcctaacaggaataaataacacaacgcgccgcaggctacggagatcgccagccgcagcttgacatcaaggctgatccgctccgttccgaagctggctgtaaaggcgatgacacccattgccgccgtaagcagaaacggtttggccacggctttgaagtaagccgacagccgcagcttaatgacatatgccaacagccagcgcccgatcaggaaattcaggatgctgatgaaagcgtacgtccaggctaccgtcaagagatttccggacagcacggcggcgtacaaagatgcgccatacagcagcatcaccccggcgtcccaataaaacgccagatcggcccgcccttttgcgagcagcacagatccgttcggattcatcagaacccttaatatcccgacgatggcgagaacgtttaaaaccgggacagccgccagccatttttctccgaataccgaagccacgaatgcatccgacactgaaaccaaaccgagcaaaagcggaaaggatatcagcgcgagtattttggtcatattgagaaatccttctctgataacgctgttttcatgcttgtttttcgcaaagacgggaaacgcaactctcgtaatgatcggattaatttttaataccggaagcgtgacaatctggtaggccagattgtaaatgccgagcgcctcagcgccgataaaactgccgatcagaatcatatcaatattcgctccgagccggttcacaagccgggaagacagctgaaaggccccgaaagaaaagaaacctttcattcctttcagatcaaaaaccaacgccggtctccatgtttttctgcaggccatccagtacagaatccctttcgacgattgcagcagcacctgagaaatcacataggcgagaatcgggtccgtataaaaaaccgcggccgccaaatacacgaaggacagcacatttgaaaagatttcaatcttgcttaacgtgttaaatgccagcgctttttgcagcatatactggtattgctgaccgatcggcgcgattaaaaacataacggccagcacgcggattaaatagacaagctcctcccgccgataaaaatcggcgatgagcggactgctgaaaaacagcagcgcaaacagcgcaagccccgttatgatattcagccagtacaaggaagacatctgtttatcagtcacatgatctttttgaatgagcgcggcgccaaaacccatatcaagcgcaatttgggcaaacaccactaccgttgtgatcatgccgacaaggccgaattcagccagtgacatgacccgcccgagcagggcgaattggatgatttgaatgaccgtaatacacgctgtcgaaatacttgtccatttggcgccgctcaagatttgatttgtaatactaggcatcgttttccctacttttttgtctgctgaccagaatttttatcgcgccccgtcaccggtccagatcactttgcacgttttgagcataatcttcagttccaatgaaaaggtcaggttgcggatataatataagtcaaacatcagtttttccctcggtgtcatgtcatatcccccgttgacctgcgcccagccgcttaatcccggcttaacggccagccgctccgtaaaccccggaatctcagcctgaaactgttccgtaaacacgggccgctcgggacgcgggccgatcaggctcatttctccccgaagcacatttaccagctgcggcagctcatcaatacgggtccttctgataaaagcgccgacctttgtcacgcggggatcctttttcagcgcccagaccgcccccgatttttcagcatctattttcatagagcggagcttatacaaataaaatggcttcccgtctttgcctacccgctcctgcttataaaaagccgggccgggcgactccaaacgaatcagtatggagaacaggcccatcaccgggagcgccgccaagagccccgcaagcgcaaacacaatgtccatgaatcgcttaaaagccaaataacgggccgttctttccgtaacggcagcggaagtcccctgccgcactgcatagttattatttacattcatgcttttctctgctcccactgacacacacctcacgatttgttgggatgtttgatgacctatgccgtgagtttagcagatggatgttaattggaagtaaaggaagcgttaatgtttattagaatgtttcgattattgtttttttattgtaaatctattcatatccatatttgagacaaagcataatgaaaaataaaaaaacagaccggtatgaaccggtctgtttccatgaaaaaattatcggaaataggaggaaacgccttgggtgatccccgccgcgagtctgtcctttttcgttgattgttttaaaatattggcatcaatcgggcttgtgacaaaaccggtttctaacaagacactcggcattttagaatacttaatgacgtaaaatccggcagttttcacactgcggtcacgcgtgccgagagcagaaaccattctcggctgaatattttgggcaagcctcagactgtttgcggattggtacgttttatcataatacgtctccgtaccgtttgcactgctgttatcatttgcgttcgcatggacgctgatgaaaatatcggcgttcgccttcgcccctttgttcactctctcctcaagcgagtcaaaggtgtcgcccttcctcgacattacagtaagcgcgcccgcgccgtataattgattgttaagacgcgtagcgatatcaagatttacatttttctcaagcaagccgtttccggttgcacctgaatcctgatagccatgccccggatcaataaagaccgttttgccgacaaccggatttttaagctgtgacgcggcattgttgcttaaagatgaagcacttcctatgacagtgaagctggtgatgtttttacttccgatatacgtccggacgtcttttgacagactgtctccattcgtcagcaggtgaactcttccctgtttggcgctcagcacgcctccgacgatggtatccgcctctttaaagccattggtaacaaacgtatagcctgtgcttaagcctgtcttttttgcaagattcacagacaggttatagcggtttttgccgctgattcttgaagggttcggcagtttattgtaaagtgagctgctgatgctgcttgtcccgccgatgacaatcgtgtttttaatccccaagcttttgatcgcattggacgtagaaccatttaatgtcgaatcattagtgaataaaaccggatattttttagcggacgcataagaaatcgcagccattccatctgcatcaacaaacccgttgaccacaagggctgtagaagatcttgtcatttcacccgccacttttgcggctgtggcatatctcgtgctccctgataatcgtttgacactgatgcctaatttagcaatttgattttcagtatttttcgaaacggcaggtgtgccgcctacgataatcacatttttcgtttttaaatcaattaatcccttttttgtgccggcagacagctgatctttatttgtaaacagcagcggcgcatttttttgatatgaaagcggcgcagcggcaattgcatcggcatatgaagttccgccggtgataatgaccgttttcgcttcaccccatgattgttttgccgccagtacagccgtatcataccgggtgcttccgccgatccttttaaccgtgttgtcagccaaagcggaagggacaaatagaatgaccccgagaataaagacggggagacattttatgatgaatttcaatccgatctcctccacagaagtttagtagtttgtaagtgctgtattaggataatagaacgcaagaatagaagtatacggctctccggcctccgctctttcttttgctccgtattgactcattcctacgccgtgaccgtatccctttcctgatatcgtgatttgcgaagaattaccggacgcactggcgtatgtgcttttaaaagatgaagctccgatcatcgtcctgagttcagacgctttcacctcaacagatgcagtcttgttcatgacatagcccttcgacttgtcattcacatggtacgtgaccttcaccgcggcgtcttccgcgcgctggccttttgtttttccggtgagcgagagatcagagatgcttgcaatttttatggaacttgcattggtttctttatttttcatcagccaattttttattccgttgagctgcgcagcatttgcttcgtttgttttagaccaccaggatgcgggatttttcatatccagacccgctggcagctgctgcttctgcaatgttaaagaccagctgatttccggatcttttgtatcctttttggctactaaatacggcactttcgatccccacacttcatcgccggattccatgtaaccgccattgcttgatgagtaagtggcatctatcaatctgccggaataagtgagcactttcccttttgttccgttaacggctgcggtggcgtttggataccagctgtatcccccgtaaacctgaaaggccgttgtatccgcgactgtttgtcccatcttgccgatagagtaggtgcgggcagcaacagcctgggctttcagcgcttctgtcggccagcttcccggcatttcattcggcaggacacctttcagataatcctcaaaaggaatgttttcattaacaggtcttacatatttgccggattccgcagtgaaactcatattccccagatatggcttcccgtcaatgctgattgtgtttgctgttgaatatttttcaggaaccgccttgaaagacgtttttccgctgttaatgcctgcaacgcctaatttgccgccggacgtttcaatacggtatgtctttccgtttacgagataaaactcttttgcgtaagcagccttaactgaatcggcaattgaatttgcgctgcctattaatgtataagaataggtgcctttcgttttaaaaaggctggcctcgtcggcgggtgtttcgctttttttgatgtatacaagcggcatgtgatttgcggcggcaatatttgatccgacaacgatgtccgctaatttagtcccgttggcagccaccgttttgcttgcatccatgccgagcgaagtgactgcgtttgctgatatttgatatctgtttgatccggtaattcttttggtgaccgaggccttctttttaatttgattctccacatctttgctgacgcttgaagtgcctcccatgatgatcacttttttaggcagattgtagctcggaagggagtcttttttcgtcaggagaatcggatagccgttttgcgcagcataaggcgcgattgccagcgcatccgtatatacatcccccgttactacgaccgcctggtcatagctgcccatttcggccgcaatatttttggacagatcatatctgttttttccgctgatccgtttcgtacggccgtatttcttcaatgtcttttccgcggctgacgaaatactgttcgtcccgccgatgattaaaatattatccggactgaatttcttgatttgcgcttctgtgctgctgctcagctttttcgcttcagtcagcagaacaggcgctttcagtttattcgctaaaggaatgacggaaagcgtgtccgcaaaataagcatccgtattaacgacgactatgttggacgggtttttccaatacttggatgtcgcggcgttagccgtatcatatttggacgcgcctcccaatctggcaacggaggagacatcgcttcccgtcagtttataagttcctgaaggttcgatattcagagtcgatttattaccaatataattcgtcagttttactgagatatcagaactggacgcaaaagtgctttccggtaataaagccaggctgaatatcacagaaaaacagacagcccatattgttttcttcaatttttatcccgccttttgctgatcatggtgtattattttgctttctcgatttccttgatctctttttggcctttatcatttgtgaaatacgtaatgctgactttgtcattttcactgaatttattcagaacatcagagaagtcatcagaaaattcaaaactgacgggctgatcatccacttttacttcaattgtgtgcgtatccgccataccgacataatatgccgtttctttttgagcctggttctccgaagaaccgcttcccttctttgattgatccgccgttccgcacgctgccaatacaacagaaaaaagcagtattaagaacgaagctgcaatagtttttttcatttttttcacctcatctttatgtatcgtcttatactaacttttttttaaggtaattttaaggtctttttgtaacctttttttaagaatttcgtctattacatggttataagtaaaaatataactgggtttataaagattagtaaattgtatcaggaaagttaatagaaaaggtgatgacaaatgagagctgaacgaaaaagaaagaagaaaaaagttcttctgacaatcgtaacaatcatcgggctgttagttttatcatcaggaggctacgtctactacttgtggcacaaagcggcttcaacggtggcaagcattcaggaagacttgaaaaaatcggacaaacgtgacacggatatagatctcggaaagaaggatccgatttctgttttaatcatgggcgtcgatgagcggaaaaatgacaaggggcgcgcggatacgatgatttatatgaccgtcaatcctaaaacgaatacaacagaaatggtcagcattccgcgtgatacgtatacgaaaatctccggcaaaggtacgatggataaaatcaaccactcctatgctttcggcggaacgcagatggccgcggataccgtcgaggacctgcttgacgtgccggtagattattttgtgaaagtaaacatggagagcttcaaagataccgtggatacactcagcggtattacggtgaacagcacgtttgccttcaactacgacgggcactctttcgcaacggggaacatcagcctgaacggcgaagaagcacttgcctacacgcgtatgagaaaagaagatccccggggggatttcggcaggcagcagcgccagcgccaagtgatagaagggattatttctaaaggggcaaacatctcgtctgtcacgaaattcggagatatgtttaaggtcattgaaaacaatatgaaaacaaacatgtcattcgatgatatgtggacggttatgactgactataaaaacgcccgcagcaaagtcactcagcatgaactgaagggaacgggaacgagaatcaacaatatctattattacaaattagatgaagcaagcctcgcttcagtcaaaaaagaattaaaagaaagcctgaaataataaaaaactctgcatatgatgcagagtttttttattctgtaaaaggctgcggacgggtttttctatagccgtaccgataaagcagttcttccacaatccgttttgaagccgatccgtcaccataagggtttgacgcctttgacatccgttcatattcagcctgatcggttaagagctgttttgtcagctgatacaccgtttcttcatctgtacccgccagctttaatgtcccggctttcactccttcggggcgctcggttgtgtccctaagcaccaagaccggctttccgagagaaggcgcttcctcctgaaccccgcctgagtcggtcaaaatgaaacttgctttcgcagcgaagttatggaaatccacgacctccagaggttctattaagtgcaccctgtccgaatcagcaaaatgggcttctgcggcctcacgaactgcgggattcaaatgaacgggataaacgacttgtacgtcctcaaactcttcagcgactcttctgacggccttaaacatctgttccatcggcctgcctaaattttcacgtctgtgcgctgttaaaagaatcatcctgcttccttccagcttgtcaaaaatcggatgaaaataatcttcccgcactgtcgtttgaagcgcgtctatcgccgtatttcccgtgacaaatatagaatccggctttttattttcagaaagcagattctgctcggcctggcttgtcggcgcaaaattcacatcagcgatcacgcccgtcatctgccgattgatttcctcggggaaaggagagtatttattatgcgtacgcagaccggcttccacatggcctacggcgatttgatgataaaaggcggcaaggcttccggcgaacgttgtcgtcgtatctccgtggaccaaaacgatatctggttttacttcttggaacagcttgtccagtttcagcaaagcatgagatgtaatttctgaaagcgtttgacgctctttcataatattcaaatcaaaatcaggcgtaatgctgaatgcttcaagcacttgatccagcatctgtctgtgctgtgcggttacagtcaccagcgaatcaatttcctgatatttttcaagctctaatacgagcggagccattttaattgcttcaggtcttgtaccgaatacggtcattacttttagttttttcaacggtttgtctgcacctcgttttatatgtcggatatcccttcatgttaacatatttatgccgtttcttagatattgtaaagcttaatggcaaacaaagcaaaaaccgttacaagactctttgaaagcggattaaaaggtgtgaattttaatcaattgtggtaaagtggaaaaagactaggttatagttctgaaaaaaagattttgcagaaacaaggatggtgttattcagtgaagaaagtacgcaaagccattattccggcagcaggtttaggcactcgttttttgccggccacaaaagcaatgcctaaagaaatgcttccaatcgttgataagccgacaattcagtatattatcgaagaagctgtcgaatccggcatcgaagatattattatcgtaaccggaaaaggaaaaagagcaatagaagaccatttcgacaatgcccctgaactggaacgcaatttagaagaaaaagggaaaatcgaactgcttcaaaaagtgaaaaaatcgtcaaatattgcggatatccactatattcgccaaaaagagccaaaaggactcggtcatgccgtttggtgcgcacgcaacttcatcggcgatgaacctttcgccgttcttctcggcgatgatattgtccaggctgaaaaaccgggacttcgtcagctgatggatgaatacgaaaaaacattgtcttcaatcatcggtgttcagcaagttcctgaaaacgacacacaccgctacggaattatcgatccgttaacaaatgaaggccgccgttaccaggtcaaaaattttgtagagaagcctgaaccgggcacagctccttccaacttggctattttaggaagatacgttttcactcctgaaattttcatgtacctggaacagcaggaagtcggtgcaggaggagaaattcaattaacggacgccatccaaaagctcaatgacattcagcgtgtcttcgcttatgatttcgaaggaaaacgttacgatgtcggtgaaaaactcggatttatcgagacgacgcttgaatttgccttacaggatcaggatatccgccataaattaattccgttcatgaaggatcttcttgaaaaagaagaagctgacgaatagaaaaagctgccgaatccggcagctttttttatgtgatctttactttttagacgttacggtcagtgttttatcagcattgttcacagaaaaagtatattcctggtttttaagcatgagcagattctgattgattttgctgccgcctttttcacttaaagctgagatgtctgcgggacgcgataaatgaaaaaccacttcggagactgtatccttgtcaatcactacatccgtttttgcatcggatgtttttaatacgttccgtccgtcagccgtttgtccggcagctggatttttcaatttactctgtacatcgtcccggcttttattgagatatgagagaaactcttctgctgtttggcttgataaactgccgctgaaatcattaagctgaacatccgtcttttttaaagcgttcactttatacagatcagtctttttcataaagtactctttatcgtttaatttcactttggccgcctggttattttcggcttctacctgcaccttcgtgccgaaatttacacttgcggaggcttttccttttatatctttttcagtataaaggtccgccttttcagcttttaccaaagcaggtttattcacagactcataaaggccggcatcgctctgtttgacgtcaccgaaagatgtaatcgcacgcagaggcttgtctgaaaacatcgaagcgcctgcgccgacagccagcaatgcaagcagcgtaatctgtatcgtattggcaatgaatttgggcttcgctttcttttgctgcgcctgactgattttctgttcctcggctgcccgcgttctgccttcaatctgctcgttttgatatttcttcttttctttctttgaaagcttgttgaaccaatccacaaaagctttatattctttcacaacggctttcgtttcgtcgaacatgcgcatttcgccgtaatgcatccaagccacccgatcacacattttctcaatctgtccgatggaatgactgacgaaaaagatcgttttgccgcgttctttaaactccgtaatgcggtccacacatttctgatagaaagtctggtcccctactgagagcgcctcatcaataataaggatgtcagggtccatatgcgccgatatggcaaaaccgagacgggatttcataccgcttgaatagcttttaacaggctgatctataaagtcgccgatatccgcgaattcaacgattttttcataaagctcgtctatctgccgattgttgagacccatcatcaagcattttaaacgaatgttgtctttaccgcttaattgattgtttaatccggcagaaatcgcgattaaagacggctgcccgttcatgtcaatctccccgcttgtcggcggaatgatctttgcaagcaaattggacatcgttgattttccagacccgttgatccctacgaatccgatcgtttccccttcatagacgtcaaaagaaacatttcggacagcgaaaaaacctttttgatttctgtttgggaaaaacagtcctttaattttgtcagactgttttttatatagaaaatactgttttgaaacatttctgaacgaaacttttagtttcatcgtataatctccttactatattaaagaaagtcaacaaacttatctctgaatttcatatgaagaagtgaaccgactgttaataacagcagtgtgacgaaccagaaatacagcgtgtatttcacatcgtggaaaaaccactgcccttccataaagctgtctctaaagccctcgataatatagaaaagagggtttaacttcaagatggtcaaaacttcaggtctgtttccaaatttctccgcaatgtcccagaaaatcggcagaagaaaaaagagcagccttgtgacggcctgaagcaaaaactgatagtccctgattaaaacgctgatggttgaattaaacaggccgaaagcaaacataaaactgatcatgcaaaacaagtaataaatatattgcagccagtgaagcgtcggaaacagtccgttgctcagcagcacaataatataaatcgccatcatcacaaagtaactgaataaattcgatgctatcactacagaaggcagtgaactgatcggaaagttcattttcgacactaaatttatccgtttaaaaacgctgttagatgcatccagtatcgtcggactgataaagaaccaaggaattaagccggccagcatccagacgatgaacggtacgctgtctccatttccaagcaccatatcatgtccgccgcgaatcccgagaccaaatacgaaccagtaagccagcatttgaatcatagggttgagaaactgccacaatatacccaaatagttcacttgatactttgatttcgtttcgtacactgcaagccgcataatcagcggaaatgagttgaattgctctttcagaatttttaccaatgcattcattctaatcttccttagtcgtaagttttaggtaatagctttgacttacaaaagcaccgctcataattgtaacagattacgatgtatttttcacttcataacaagcctgagtcccatgagcgcaacatgccgtcacttaagcaaaaaagcataattaacgtggttaaattatgcttttttgcacttatttacttgtccccgaaaatcacttttacagctttttcagacgattctccggtttctaaataacagaacttctcgtaaaaaggcccgaatgaatccggaagcttataatcatctgattccgtttcattgacccatttgataacgtcacctgtttctttgacaagcggaccgggcgcttctttttcaaagtcaaagtaaaaccctctgagtttatcccggtacgtttcgatatcaggcacataaaacagcatcggtcttttcagatttgcatagtcaaaaaagacagaggaatagtccgttatgagtaaatcagagaccatatacagctcacggatatcttcgtagctggagaaatcatacgcaaatccttcatacggtccgagatcaaagttttccgccacgagataatgcattcgtaaaataatgacataacgatcgccgatcgcttctctcaattgatgaaggtctaaatcaaggtcaaacttgtattttcccttcttataaaattggtcatcccgccatgtcggtgcgtagataatcacttttttatcttgcggaagattcattttttctttcagcgctttgatgacagaagggctgttatccgtttgaaggaagtcattccgcggatatcccgattcaatcatggttttattaaactgaaacgcccgggcgaatatttcggttgaatatgcgttcggtgaaatcaggtaatcccactttgaagcctctgtcgtaaagttgcgcttgtatttttcagtgtttgttccgggcatatgcacttcatccatatctacggcaaggcgctttaaaggcgtgccatgccatgtctggacatatgtcgtatgctcaggtttcggaatccacagcggcatacggctgttgacaacccagtactcggctcttgccatggcaaacagccatttgaacgtaaagcgttcgatataaggaattcctttatctttaaatgtctgtgagtaagcggggtttacactccagcagagacggtattccggcatctctttgctcatgtattcataaatcgcccgcgggttgcagctgtactgttttccggcaaagctttcaaacatgacaaatttctgtttgacaggcagtttccccgcaaccctgaatcccgctttataagtgttttgtattcttttctcaatgaactttttcagcttattctttctcttgcgtacaaaggaagcgccccgtttcagctttcctttcacaaaatactccacgcgggtgctgaagctgtaatcgttcattctcaggtggagatttttcgttttctttttcgtgaaaacgtgaaatctggcaggccctttctccgttttcaggatcgtgaattggttagggtttacttgttcagatttcagaacctttaacggtttgctgttggtgataatctcttcacccgtcccggcatcttcaaaaatgaattgaatatggaattgaaagattagctgctgattcaattctttataaacggcattcaaatcaatttttgtatcaaagcctatcgtgtcaagcatcgttgtgtcctgaacatattcatcaaggtcgtgtctcggcacgtcgtgaagcggatacttcagaatgagaggctcctcttcttttccttttttcattttcagaatcaggtttttttcttttatctttaaggtttctgccgcattcagccggaatgcaaaacctttcagatgtaagctgccgtcagattcgagctccatttcatcaatccgcgtgacgaactttttctgcagcagctttaaggagaaattccctttcttcgtcgtgtaagggaaaaagaacatatgatgagcctcatctttataagaagacagttcaataggttcaaggctggattttaaccgttttttactgatatcactgtcatcattgataaaggagacatagaaatccagacatcctttgccgtccgtatggtcagaaagcagatccgtgctcataacagcatggtactccccgccttctccggccaaccgtttcagagggacggaaagttccgcttttgtcttacgatttataatctgaagagaaggctcttcccctgcagtgacattttcacaggatatcgtaatgctgaatgtctcttcctttatgttaagatgttttaacttgtatctgacaggattttctatacccataaaataagtctactcctctgtttcaattaaacatatccaatcacaatcatcattttgttactttcagcgaaaggttctccttcaccgtccggtagaattgatattgcagtccgttcgcttctgccgtcaccttttcaccgtcgtctctgtttaacatgacacgttcataatcgttataaatgacatacataatataaccgccaagtccgactttttcaatgtcacgtaacgggatttcaaggacgtaccgcccgtctcccagtgactgaaccggaaactggtggaatactttcatgttatctctgtgctgaaactgaatatattgggcattatttctgtcctgtccgaacaagcggaacgtaacggtgaatttatgatcggcgaacaccgcgctttccgtttctccgtgcatgcgaagttcgaccagtttattttcttcatccgtcagcgggctttctaaataagccagtccgccttgcgtcacgatgtttttatcgggctcttttttggaccagcggaacagcttttcgacctcatcataccgtttttgagtcagcagacggtaggctgttttatgaatcggatgaaaaaatgtctcggaaatatcgtatttcgtcttctttaacacattcagaatttcattgaatttattgtaataggcttctttgttttcgcttttcaggaagtgcatccgatcgaaaagacgcgtaatggaatcgaattcgatcaggcggttcattgccatcttctctttttcagtatctaattttttgttcagaatatacttcattacggctatgttcgtgtcggttttttccattatattagtctgctttgtcagcgactcattattgtccattctgttcagataatagaccggctcggttgacgttgaaatatctccgcacgccaaaagaacatccataaaaaattgcttatcttcagcaaatttcatttccggatatctgatatcattatcttttagaaattgtaagttcatcattcttgcccgcgggccgagatgatagaaaatatgccggattgaaaaaggcgataccttcgctctgttcagagaagactcatgtttcccgatcgttttttgaccgttcacctgcatttcgatcgtttttccgaccgcataatttacctgatctctttcaagcatgtcgaataagattttaactccgttcggcgcaaaccaatcatccgcatccaaaaatgtaatgtactttgcatttgccagctcaatccccaagtttctcggataagccggggttcccgtgttgtctttcaaaaagacgactgtaatattttcatacaactcggcgtactcagtcaggatgtttctggaatcatcagtagagcaatcatcgacaagaattaaagaaatatgctgaaagccgatgttttgaaggatcactgaatcaactgttttccttacatattcttctgcattataaacaggaacgactaccgctaccttcttctcttccgccaatgcttctttgtttaaaatggtatattcgcgttcttctacggacggcttggactcttttttattcaacttaaaaaagttactaagattcatctttaaattctcctcttattgtctagctttttttcaaaagcgcataacaaatatagcgaaaataaccttatattacaagaagtactccctatccggagggagtacttctttatcatctgtatatccgaatgtttcaattacaccccggcaatttcttttttaatctgtgtggtggaaatgccttcggttctagggaggtagatgacttcgcattgatctttaaggaaatcgaatttgccttcccaatcgtctcccattacgaacacgtcgatgttgtgatccgctacgtcacgtactttttgatcccagctgttttccggaatgacttcgtcgacataacggatcgtttccagaatcagctttctgtgttcatagctgtggtaggcctttttttgtttttgcaggttgaactcgtctgttgagatggcaacaacaaggtaatctccaagctgctttgcgcgctcaagcagtttaatatgaccccaatgcagtaaatcaaacgttccgtaagtaatgaccttcttcatgaaacaaaagctcctttctatcatcatacgtataacaagcaactgctctgaaatgctgcgcagctgtatccttaatcactaaagtgccaatttcgtactcatggaacctcattatatcacatagccctgaaaaggttaagccaatgtaaaacgaagttacattccacttattaacaaatgttattacaataggagtttagcagggtttttgcgcgtatgattaaagaaattgttatcttatttatatttttgtaaaactattgttaagtttatctgaaggtattatgttaaaataaagcttagcctaagtcacgaaaaagtgaaagaaaatcccgtacaaaaaggaggacggcagatgcagactgaaatggtgcacaacctttcttacgttaatggaaatttacaggagtttatttcatatttagacacttattatatcgcacaaaagcaaggagccgtcattgcgacggtcaatcctgagatcggatacgctgcggcgaaagacaaaggttatcatcaagtcatttcttccgcggatttcgtcctgccggatggtatcggcgtcgtgttaatgtcacgtttgacgcagcacccgctgaaatcaagaattgcgggattcgatgtgtttcttgcgctgctcggcctcgcaaaccggcagtctaaaaaaatatttttatacggagctaagcaagacgtgcttgacgccgttttgaaccggatcagcaaagagtatccgaatattgaggttgtcggagccagcaacggttatgaagcggataaacgcttcgtcgccaaacagatttcccgggcgaaacccgatctcgtgtttgtcgccttaggatatccccatcaggaacaatttatttatgaatacaaacatcttttccctcaggctgtatcgatcggtttgggcggaagctttgatgtgttcagcggaacggtgaaacgcgcccctgaatggatgatcaaaacgaatctggaatggctgtacagactgttgacgaatccgtggagatggaaaaggatgctgaacattccgaagtatgcttttaccgttttgagaaataataaatcaaataaaagcctgtattccaagcaggccgaagatcaaacgaaacagctttaaacaaataaaacagcaaaagagattggtaatctatgaacttgcgatctttattcgccgctttttattctatatatctgtctgttctcggcgttttgttcaagcctgtaaagcccaagaaccatctgaccctgctggtatcttttgaagagaatgcgcaggctctcatccgttcttacaaagcgcacgctgaatcgctttcttatgaaatgacggtcttgtatacgagacatgccgtcagtctgaaaaaagagctggaaggtatcggctctttttatctgaacgaaaaacatccgctgcatcttttaaaggctgttttgatcctttttaagagcaaagtggtgataacggataactatttcctcatgacaagcgtcttaaaccgccggccgcaaacgacatgcattcaggtgtggcatgcgaacggctctttgaaaaagttcggccttgaggatgtgacgaatcaaaaccgtccggcatcagatatcagccggtttaaaaaagtgtaccgctcgtttgactttgtcaccgtcggttcagacgcgatggctgacgtttttaaaaagtcgttcggcatacgggacggccagctgttaaaaacgggtgtccccctgactgacgtctattatgaagaacacaagccggaactgaagcacaaatggccgaaaaaaatcatcctgtacgcaccgacattcagggactatgatatgcagtcctttcggctgccattcaccgaagaacagctcacaaacgcgttaaacggagagtatatgctgcttgtaaagcttcaccctgccgttttgcaccagatttcggcttcgtttgaaagcgaactgatcaagaacgtgtctgacatgcgtcttcatgatctcttgaaagcggctgatattttaattacggattactcttccgtgccttttgaattcgcgctcttaaataaaccgattttctttttcacatatgatctggaggaatatgatcaaaagcgcggtttaatcgacaattatacttccgtcattcccggaaaggcttgtcatgacagcgaagcccttctggaggaaatgacgaaaaagccatttcgtgcagaagaaatgaagcggttctcggacaaatggaatatgtattcagatgggaattcgagtgaagcgttattaaaatttgcagagacagaaatgaaaaaatgtgatgcagcacctgtctgaatcgacggcgggtgttttttgcatgaagaaagggctgaagcatacacttcagccctttttttatactttcatatacacgggaacatcatagtaaagcgtatagtcatccagcagtgagtataagctgtacatgcggtttacctgcttatacgcccagccgatgtctgtcgcatactgatgggccgcggctggagaccatctcattttatacagcgtatcctgctcgtatgaaggattgtgaatataagacgcaccgataaattgggctccgccgataatcgcggcttccggagtaaaccagccttgattatacgcgtattgtgcgccgtagtaattcgggttgctgtcataagccccgatgccgtacatgttgtaaacctttttaccattatacataatgccgttcgcaagctctgacgtgccattgcccgtttcaagcaaagcatgcgaaatcaaatacacttcattgatgctgtatttgccggcggctgtaataaaggcctggcctttccctgtcagtattcctttattgaccagcactttttgattcagttccggtgcgttcagtccggctgtctgagagagcttcagaaattgaaagtaatacttgctgtcttgtgcgaagtgagccggattgacgtactgcccgacttcgtcactgctggcgtttctccagcccatgctgagtttggcccagccgtttgtctggcctgtgatgctgactttatcaccttttttcaactgcccgataatattgccggagctgacttccggggttgaccggacgttcaggacgtcggctgtgaccgttccggaggccgtattgatgtacgtaagcgatgcataagccgcggcatcagtctgcgggctgactgtcatttgttttttgaccatatctgccagcgagatgttgtaattggtattcatgatttgcggtccgttttttattttcaaaatagccatcgtccatccgtacagctttttcagcttttgggaggcggcgtccgctgactgcgctcccgtgaattgatcgcgaatgcggagttcataaaccggatggctttcactcgtatagccggcctgtaattgtttggcgctgaaaaagctcatacttttatttaaaacggttttactgctgaatgtttcggttttgatgacgtactgtgcagagccggttttccccgtctccttcacagtgccggccgctttgttttgcttgaaaaaagcagtcacgcggtcaatgtcttcctttttaagcagcggtgccgtttcaattctgaattgtgtatacgctgcttcacctgttttctgtgcggaggcggatacttttttccctttgaaaaagtccagcgaacgattgatctttgccgtatcaagcagtgattcggttgtgacttcgtacgttgtgtccgtctgcttggatattgtttttgaaatggcggtcagtttatatcccgccagcagattcaatcctttttttatcctcgactggtctgccgtctgctgagaaagcagctgatattcgttttctgctgtttttcccgccgctgttcttgccgtctttacatgctgctggcggaaaaacgcctccgcttgatctgcctgtgcagcggtaagctgccctgccgtgatccgataaacggacactgatgctgtctttttgacaggcgatgcgtcgcaatgccattttttctttttaaagaaagcttgaacactttgcagctgcttagccgtcagtccgctcatcgcgaccgtgtaattatttttcttgccggctttttgatagtttccgctgacacccgtattcttcttgatttgggtgatagcattttgtacggcgcttactccgttaaaatatcctgactgcacgttgtacacggttgctgttttgctatgggcatacttttgaacattccctttgacgcccgttttctgctgcagctgtttcgctaaacctgccgcatcatttgcatttgaaatgtcagaggctgtcacggtgatattcggactggcctttgccgtgactttcagcgacgcctgcaatcctgtttccttttgaaaatcagtttggatttgagcggctttttgatcgccggagattgttcctgattggatctgaaaccgggctgtttcccgtttgatctgacggtatgacgctttcacgcccgtctgcttcgtcaacgcttgcgagagcgcttttgcgtccgcttcggccgccatctcagcagtcacgacctgcatgtacggctgttttgtccccgccggcttgacggcgccggtcacgcccgtttttttcgtcagttcggcaagaagatttttcgtctgccgctcgtctgatagaacgcctgatgtgacggtcacgtacggcagtttgcttccgcttgcgctgtaagtgccggccacgcccgtctgcttcgtaaaatctttcagcacggttttcgcatccgtttcatcgtgtaatcctgaagctgagatttgataagtgagcggcgtatttccggctttctttgcgtcagcctgccaccccgtatcctttttcaatttcgctgccgcttgaagcgcctcgttctcagaagcaaattgctgcttcgtttccagctcgtaaacggagtagtcgctgtatgcggcctctgcgggctgtgtaagggtgcaaaagacaaggaaaacggcggacaataacataggtgcaacgaatctctttttcattccttctcctctttctgattcaattggtttctatcaaactagtttatttatcggccggccttcttcatttttacagagagaaatcacccaattttccaaataaaaaaaacttaatcccagagctgggattaagtttggttttatatatgagaaacgatgatcgtgcaatctccgtttatcgtaaagtcaggcatctgatccggcagtatgaaatgcgcgcctttttcaagcttggcggacttgccttcatagaggatggagccgcttccttctgtgacgctgcacagcataaacggagcgtcctgggtcatttccgccgtcccgctgatatcccatttgtatacagaaaaatattctccctgcacaaaggttttgatggtgacgccttttctcgtttcagttgattcatctaaaaatccgtccacatgaggaacggtggcggcgttgacggcatcgcggatatgcagctcacgcgcctggccgttttgatctgtacgcccgtaatcatatatccggtaggcggcctctgaattctgctgtgtttcaagcacgagcgcccccgcgcaaatggcatggatggttccgctcggcacataataaaaatcgccgggtttgattttcacacggcgcagcaggccttcccagtcaccgctgttaatcatggtgacaagttccgctttcgaacgggccgtgtgaccgtatatgatttccgcattttctttacagtcaataatgtaccagcactcagactttcccatttcaccctgtccatgctcctcggcgtcataatcgtcaggatggactttaacagactgatgatgtttgacgtccagtattttcgtcagcagcggaaaccggtccccttccgttccgccgaataattctctatgctgatcccacagttccatcaaggttttcccttgatacggaccgcttttgaccgtgctcattccgtgcggatgggctgatatcgcccagcattcgccggttgtttctgaaggtatgtcatatccgaatcgttcgcgtaatagcgtgccgccccatagtttttctttacatacaggctgtaaaaaaatcggctcttgcgtcatgttcgttcccctccccttaaaaagcggctcatatcccattccccctgtgtcttttttaaaacacggagggagccgcggttaaaaacaatatgtataaaatggctgacctgctcattataccattcggatggggcggaatgctcagtcatttcctattccagaataaaatgccttgtttgtcgcaaattaaaataactgatggaaaggggggaacattgtgacgatacatgcggagctcggcaaaaaccttgaagtgctgaaaaaacggttcggccaaagcgatgacatgatgttttattcgtttacgtacggaaacggcaaatgtgacgcctgtcttatctatatagacggactgaccgacaatcaattgcttgcggaatatattatttcgcccgtgcaggcggccgcccggcatcaagaggaaccggctgaaacaccgccgtcatccatctctttcggctatcgtcatacccggctttcttcacttaaggacgcggaggcagacattttctccggcaaatcggttttgctggcggaggggtgggaggaagctctttcgtttgagacggaaacatttaaaatgcgtgatattgaagaaccgtcttcagaagtgcttgaacgggggccgaggataggttttgtcgaaaagcttcggacgaacacggcgcttttgcgcgagcagtccggtgatcccaacctccagatcaaagagatcacactcggcgaacggacaaaaaagcggatcgccgttgcctacattcgggatattgcccctgatgatgttgtaaaagaagtgatgaaaagactggagtccatcaccattgacgacattccggaatcaggagcgatcgagcagcttattgaagataacacgtattctattttcccgaccgtcttgacgaccgaacggcccgaccgggttatgggcgctcttttggaaggaagggtttccattcttgtagacggaacgccttttacccttttggtgccggctaccgttgatgaatttatccactcccctgacgattataatcagcggtgggttccggttacctttctcaggctgcttcggtatacatgcattttaatcacgatttatttacccggcctttacatatcgctcgttacgtttcacacggggctcttaccgacgagaatggcggttacgattgccggaagcagattgaatgtcccgttccctccttttgttgaagcgttcatcatgatttttacgatcgagatgatcagagaagccggactcaggctgccgaagccgatcggacagacgatcggcctgatcgggggcgtggtgatcggacaggccgccgttcaggcgaatattgtcagcgcgatgatggtcattgtcgtatccgttacggcgttggcttcttttacggcgccctcctatgcgttcaattttccgctgaggctcatccgtattttttcaatgattctgtcggcgatattaggtttatacggactgatcatgtgctatctgcttgtcatcggccatctgatgcgcctgaaaagcttcggccaggattatatcattccgatcatggcgcagcctagccaagacttaaaagatacgatcgtcagactgccgacgcctcttttgaaaaaacggccgaccagaaaagagacgaaagataaaatcaagcaaaggtgatccccatgaaaaaaccggaagacaagctgtcgtttatgcagacacttctcatggtaagcggaacaatgatcggagcgggcgtgttaacactgccgcgctccgccgcaacagcggacagtccgagcggatggatcattattcttgtgcagagtgtcgtgtttatcggcatcgtcctgctctttatgccgtttttgcagaaaaacagcggggaaaccatttatgagctgaatcaaagcatcatgggccgcgctatcggttctcttctgaatttattcatcagctgttattttgtcgtcaccgtctgttttcaagcccgttttctcggtgaagtcatcaattactttttactgaaaaatacgccgatgggtgtcgtcatattcatctttctggcggtcggcatttaccatgtgaccggcggggtctatcccatttcaaagctttatgcctatctgtttccgattgcgatcgtcattctgattacgctgcttatattcagcctgagactgtttaagctggatttcgtccgcccggtcatggaaggaggctacaaaagcttttttgagatgtttccgcggacccttttgtatttttcaggacttgaggtgattctgtatctggtgccgtttatgaaaaatccgaagcaggcgaaaaaggctgctgtcttcggcatcgccagcgcaggcttattttacagcattacgctgcttgtcgtcatcggctgtatgtcggtcgctgaagccaaaacggtgacgtatccgaccatttccctgattcacgccttggaaatccggggtattttcattgagcggtttgatatctttcttttaatcacgtggacatgccagcagtttacctgtatgctcggctcttttaaaggggcgcatctcggattaaacaccattttcagactgaaaaataaaaacaatgcctggctgatggggagcttattggcagtgacattcggcctttcaatgtaccccgatgatatcaacagtgtgtttgcattcgcgaatattctcgggtatacgttttttgccgtcattatgattccttttctcatctggtttgtcagctggatgaaaaaaatagccgggaggaaacagacgtcatgacacttttcataaaatgggcggcggcgcttttcatactgatgacgctttcaggatgctgggacgcgaaggaagtcgaaaagctgtctttcgcccggggactggcgatagacgagacgagtgaccgccgatataaattaacctatcaaaacctgctgccccaaagtgaaaacagccaggcttccggccggcccgtgtttgtcaatgtgacgacgcggggggataccattcttgaagccgtcagtgaagtctctttaaaagatccgcctgtttacagcgatcatttaaaagtgctgatattcagcgacaaattgctggccgaccaaaatatactgcagatgatgaatcattttatccgcgatgatgaattaaggcggagcagctatctcttcgcggcaagaggaaaagcgtccgatattctgacggagccgacgccgaatcagcagcagcccatggccgcggaaaagctgatcgaccttacgaacaacggcggctacaacgggaagattttaaaaccgctccgaatcgggagagcttcgatttactgccataataaactcagttttctcattcaggccgtcagcaatcaaaaaggaaaaacggtgtatgacggagcggccattatcaaaaacgcaaaacaaaacagattggcgggctttctgtcatcatacgaaatacagagcctgaattggctgatggggacgatacggggcggcgtgctgcccgctttggataaaggggggcacccgattaccttcgagatcaaaaaatcaacatccgccatcactcctaggctgaaaaacgggaagctgtcatttcatgtagcggtaaaaacaaaaggacttttgtcagaggatcaatatgccggagaagattcattcgatcagcactatttaaacgggctggaaaagattttcgaaaaaaaactgaaaagcgatgtgaaagaagtcatcgataagctgcagaatcaatatgaaacggaccctgtattcttttctgacagagtccgcattcaatatcccgactattggaagaaagtaaagcatcattgggatgagaccttctccgaagcggcctttgactatgatgtttccattcagattaccaacttcggaacgatgggacggtagccttcagcctgttttttcgacacggaggagaatctgataaatccggctttgttcgggcagctgtatcaccggaaattgcatcgattgcgccattcgtgtgatttcctgtaaaaacagctgcacccgctcatccacgtgaacatacgtataggactgctttttcacagcaaatgtctcttccggaaagagcgtgcgcaccgtctgcggcgtaaaaaaccgcaagtgggtgcggtcgagaataccggcgtctctgtatgtccagtcaccgagcagaagcgggaacagcgcttcggcgtgggaaatattcggaatgctgcaaacgattgatccggcaggcgacaaataggatgagtacgtttcaatgacgcgccacgggtcttttaagtgctcgaggatgtccgcgaaaatgatgcaatcaaaaaagccttccggataaggcagcttcacttcttcgacatcttcctgcagcaccgcttcatagtgtccttttgccgcttgcgccgccagcgggtgcagttctattccgtacagttcgcaaggctgtctgttttgaagttccagccccgtagcccccgcgccgcagccgacatcaagtatccgtttcgcctcccggggaacgagctccgcaatttccggtctcggatgagtaaagtacgtaaaatcagtgccccatttttccgtaaaacgctggcggttctccgaatataactgattgatattgatatcctgattagccgtaaacgtcgcatgcccgtggtgatgcacaaaggcatcgagggcgatgtgcaggctgtagcctttttggagggcgcgcagacataggtcatcatcttcaaaagaaccgtatccgaattgctcatcgaacgggccgatgtcttcaatgacgctttttttcaccagaagacagaaaccgacaaggcgcagcacccgctttgtatgatgcttttcccgtgcgcaatacgcctccgcgaatgactccagctcatcaagcgattgatatgcgttatggatcatttgcgcaccgctgacatagttgctgacgggcccgaccataccggttttttcagattgatacagcaccctcagcatggaggtgagccaatttttcgtgaccatcgtatcgttgttcagaaacagcagattttctccccctgccgcttcgataccctggttgcaccccttggcgaacccgaggtttttttcatttaggatgactttgacgtcaggcagatttgatatgtattctctcgttccgtctgaggaaccgttgtcaactataatcagttcaatcttatctttgtcggtgtatcgttcaatgctggccagacattttttcgtcagctcaagttcattatatgtaaggataataatactcgttttcaccggcatccccgcctttatcgtgactttatacaacgtatgacatatccccgtcatttatgtgaccgggcgcccgcacggcatccgttttgaggggccggtgaataaccgccccctaaaactgaatattacggatgaactgtccgccgatttgattctgatcccgagcctccgttacggcttttcagatcctgctcaatttcttcaaggcttttccccttcgtctcggtcactttaaaccggacgaacaggaatgccagtatcccgatcgcggcataaatgagaaataaatagctgatgccgactgcttccattaacatcggataggttaatgagacaatcaatgttccggcatgcagcattaaagtggagacacccgtcccgataccccggacatgcagcgggaataattcaggaagcatgacccacacagcaggcccccagctgaccgcaaatacaatgataaacaggcctaaacaaatcaccgttgtccatgatgcggctgctgaatgttcaaagaaaagattgaccgcggccaatacgagcagactgatgaccatgcccgcatttccggccagcagcagcggcttccggccaattttatcaatgactttaatagccgcaagcgtcatgatgacattgacggcgccgattccgaccgttcccaatatagacgcggaattgccgaaccccacactggtaaatgttttaggggcgtaataaataattgtatttgtcccgatgaattgctgcaaaaaggcaagtccgaggccggcaatcagcgcgggtctcacccacggctcaaacaattctttcaagccgccttcgttttccttttccgcttctttcatctgatcaatctcatcatcaatattcttcgttccccgcaatgatgaaaggatttctcttgctttctcttctttgccgatcgtaaacagccagcgcgggctttccggcataaataagattccgatcagcagaatgactgacggcacaaccgcaagtccaagcatccagcgccaagcgcccgcatcggcaaatatatagttcacgatataagaaacgaggattccgaccgtaatcatcagctgattcagcgaagaaagcgccccccgtttatgcttcggagccagctccgataaatagagcggaacgatcgttgtagatgttccgacagccagtccgagaatgatccggaaaagaaccatcacctctgtattcggggcaaaagcgactcctaaaccgcctatacaaaacagcagcgccgctcccatgatggccttccgcctgccgaaccggtcggtcagtttgccggcaaatcccgatccgagaatcgcccccgccaataacgaactgacgacgaggccttctgtaaaggcgttcagtcccagttcttttttcataaataaaatagctccggaaatgactccggtatcatatccgtataacgcgccgccgagtgcgccgaaaaaatagagccatttattcgagtgtatgcttttcatgttatgtagactcccttcatccaacgctgtatccgcgcggaattgttctactgcttcttttacctgtttccgtccgtttcaaaccttccgcaccgttaatatccattattttactaattattttttacaaagcgacgaaacatttcccgcttcctgccgtccaatataatgtgaacctgatgcaaaaataacagtagatgttgtcgaaatagagagaaagatttggaattttctcatttgcagagttgctccaagtcaacaattatggtacgcttcacaaagaatagaaacgagaggtaatgatatggaagaacgatctcaacgcagaaaaaagaaaagacgcctcagaaaatgggtgaaatttgtactggtattcgccgctttcttattggtgatcgccggttccgtcggcacctacgcatttgtgaaattgaataatgcgaccaaagaagcgcacgtcagccttgaccgcggcgaccagtccgtaaaacggatcaaagaatttgacccgaagaaggattctttcaccgtattgcttttaggaatagacgcccgtgacaataagggcgaatcagtagatgacgcaagaagtgacgccaacgtgctcgtcaccttcaaccggaaaaagaaaacagcgacgatgctcagcattccgcgggattcctatgtcaacatccctggacacggctatgacaaattcgcgcacgcacatgcttacggcggttataatttaacttataaaacagtagaaaacatgcttgatattccagtagattatgtggttgagagcaacttcgacgcgttccgcgatgtcgtcaatgagttgaacggcgttacggtaaatgtgaaaagccagaaaattgccgatcgtattaaagtcgatacaaaaggaaaagtcgtgctgaagccgggcgtccagacgcttgacggtgagcaggcactggcttatgtaagaacacgcaaagcggacaccgatctgatgcgcggacaaagacagatggaagtgctgagcgccattattaaaaaatctaaatcgttaagctcgatcccatcttatgacgatatcgtcgacagcttagggaaaaacttaaaaatgaacttatctcttaatgacgccatcggtctgttcccgtttatcacatcgctgaaatcggtggattctttgcagctgacaggttcagacagctatatttacactcctcagtacggcaaaaatatttattacttcaagctgaatgaggaaaaccttcaagaagtaaaaacgaaattaaaaaatgatttagacgcgtaagatgtcacggcggggttttagaaaccccgccgtttttctgttgaaaaaaaggacatgaaggtatagccttttaactgaaggctttctgctgatttcgcacaaagctgaacatactacatgaagcagctttatttttaaggagggcatccatacatatgaaattgatagccattgacttagacggcacattactgaactcggacagtgtgatttctccggaaaacagagcggctttacaaagagcggatgaagcgggcattctcgtggccatctgcacgggcagagccacgtttgatgtaaaagcgctcttgaaggatttggatattccgatcattgcggcaaacggcgggacagtccatgacaaaggataccgcctcgtcagccggctcttaatggatcagcaggccgggaaggatatcgccgcttatttaacggacaaagacatttactttgaggtctatacagatgatcatctgctgtccccatttgacggcgagtccaaactgcaggcagaactggatattctgaaaagcgccaatcctaaggaagatattcatacattatgggagggcgcaaagacgcagttcaaacaattcggcattaaacccgtacaggatatacaggcgatttttaacggagacgaacatgtttacaagcttctttgtttctcttttgatatggaaaaactaaaaaacgccaaagaagaaattacacatcatacgaaattatcccagacatcttccggaaaacacattatcgaaatcctccctgccggttccggaaagggacgtgctctgacggagcttgcctcactgtacggaattgaaaaacaggatatttacgccatcggcgacagcccgaatgatttctccatgtttgaagcggcgggaaaccgcatcgccatgggcaatgcgattgatgaactgaaggaaaaaagcacgtatattacaaaaagcaacgatgaaaacggcgtcgcatatttcatcaaccggcttctcgacaacgatcaataaaaggaaaaagccaggtctttcacggcctggcttttcacgttttccaaaaaagaaattcccaaaaatgaaaataaattgtaagataaagaaaaaaggagtttcatgatgtcgaatgcaatcgctattataggatgtttagcttttctctgcgcagtcggatacggaatattccacctcatatgcaaagctgccaaaaaagaaaaacgtttttcaaaaaagcagttttggccccttctcatcggcggatttatcctgcttctgaccggcgcctccctcgcagagccggacgcctcggccgtgaaggcagaggagaaatacagcacccttgataccgcttatcaaaaattgacgaaggaacaccaggcgcttgagaaaaaatatgaaagcatcagtgccgcggccgaaaaggagaaatccgaagccgaagccggcaatgaagaaaaactcagcaaactcagccaagagataagcgagctgaaaaaaacaaacaaatcactcaaacaagacaatgagaaattaaaaaattcacaaaagaagctcgaaaagaccgctgaaacgcttcagtcaaaaaataaaactttaaagcggcagaaagcagaaacaaaaacatccgaaaacgcagaaacggcgcaaaacaacgccccttcctccggcggacatgccgaaacgaaagcagccggcacctcacagggatgcgacattaaaggcagccggaacggcatttatcacacgccgggaagtacatactacgaccggacgacagatcccgcggaaatgttctgttccgtagaggatgcggtagcggccggatacagagcgccgaaacggtaaaagaaaaagacgtcagagacactctctgacgtctttttttacggaagccggatgccgcccgcatatttttccttccaataagcgcttgtgttcatatttgttatggtaacgcctgcggacacggtgacatgaatcacttgtccgttcccgatataaatggccggattcaggctttccgctttaaagaagaccagatcgccgggcttcagatcttgtttatcgaccggaacgcccgcctgcatctgcttgtccgcataacgcggcaggctgattcctttcgctttttgatagatgtattgaacaaatcccgccgtatcaaagccggtttccggtgaaacgccgcctttcagataagaaattccgatatgatcggccgctgtggacacaacgggattttctttagaaatggctaaattgctgaatcggcgcacccctgtaaaatgttttttccagtaatcttccgacaagtaagaaatggtgacttttgcggagcggctcgcttggatgaaccttccctctcccgcataaatgcccgcatgggaaattccttttttatacgtgtcgctgaaataaatcacgtccccgggctttatgccgctcagtttgattttctcaccgaccagccactgctgttccgcagatctcggcaggtaaatgtgaagcttgttttcaaaaacatattggaccagccccgaacagtcgaatccctcctcgggcgtgcttccgccgaatacatacggaatgtcgaggtaacgggctgcctcctgaacgatcgggtcatcagccagttccggatcttttgtcatccgctttgcgccaagatataaattcatccaataactgcttttttgaaaccgtgtgacggttacgccttctgacggagaactgtgtatcatctctccgtttccgatataaagaccgtcatggacgggcgcgttttgtgttgaatccgactttttgaaaaacacaagatctcccggtaaaaggtcattttctttgacggcggttccaatcttccattgatcactgaccgttctcggcagatggatgttctgcctggtgaaaagataatgcatcaatccggacgggtcaaaaccgtcctcaggctcttcgcctccgtaaacatatttatttccgacaagtttttgcgcgtctgaaaccatcaggacagaaacttgagaatccgcttcagcaatttccgttcttgttactgcgggtgccacaagacaaatcataaggccggcaaggatgtacttcctccagcttgtgagcatgttttctattcactctcctcatttttagtagtttttacatcggtaacttttaacaaatgtttaggagagcacacaaaaaaagaatgcccgatatgggcattctttactggattcggaacaaacaatatgccggcaagcggaatcatacgcttattttgcgcccgctgtgtcctcttgctgaatcttttgcatttccgtgtcaattttttgtttttcctgatctgtgagctgatcattgtatttaaacgctgacataaacataaataccataatgatcgcggcaaacggccatcccgctttaatgattttcatttgtttttcactccgctttcttttttaagatatcgctgtgatccacatcaaacgttaattttccatccttgacgctccacttgaaattcgattctttcgtcagttcacgtacgatcgttttatgattgatgctgccttttttaaccggtgcaggcgtcgcttcatgaatattcatcggcgtgacttcaaagcgtcccgtgccgtttttctgcaaatgatattgaacaagcgccgtgtctctcgttcttgtccacccctggtcgaatacgaagttgcccaggctgtagaaaataacggtgccgtggtacatttcgatcggttctagcacgtgcggatggtgtccgacgataatatccgctccggcatctgacattgctcttgccaattggcgctgtctgtcattcggatcattatcgtattcctgtccccagtgtgtttgaacaatgacaagatcggctttctttttggctttagaaatcatcggaataaacagctctggatcggccggaagcacacccggcgcatttcgtttagctgcaaagccttttccggaaacatcagtgaaacccagtgttgcgattttgattccgtttacatcttgataagaaatgttctgctcggcttccttcagcgtgaggccggcgccgacaagttcaagattttgctttgaaaactcttcaaccgtatcccgcattccttgagggccgtaatccatcgcatggttgttggctgccgtgagaacggtgaaattcatgtccttcaatacttttacggcatctttgtttgactgaaggtggatatttttttctgcttctttgtagttctttttatatgtaaccgggttttcaaagttccccgacacatagtcggatgcttcgaagaatggctttgcgtaacggaagacactctccgtgcctttatgctttgtcactttctcgacattccggcccatcataatatctccgacgaatgaggctgatacaaggtcatcggcatttcttttcacactcggcgtttccgccttccctgtcaggatgcagacgaacatcaggcaaaagacgatcggcagcgcgataaaaacgtgaagattggtcttctttttctgctgtttggtcagcttcagcagtttttcttgaaagcttaattgttttttcatcgtttgacacaccttacattagattaagtagtaagcaaacataatggcaaaagttgcgccgcttaagaacagcgtgctggcaaatgtaatcgttaatccctgtttctgaatggtattggcgatcagacccggtacgatgataccgattccgcggaattctgatatctcaaacggtacgatcgggtaaaggaaatcaagggcgatttttaagcagattcccgttatcagcatagctgcgaattttctgcgtccgtacaaaatcataaatctggataaaccgtatttgacgatcacgtatgtaagaagacttactaacaatacgagtaaaataaagaccggctggttaaaaacgagccctaaataacccggcacgactaaaccagcaggtacgatacctgttttttccgcgaaaattaaactgattaacacgcctaaaataagtgagatgtataaatctgatccgaacatttatccttttcctcctagctaacgagctgtttcaccttatactcttgaattttttcaattaatggttccgctgaaccgtggatattgccgacgccatatatgacacggttttgcattcttgttttcagcacgtccatgatttcgtctgttgatttatattccaggtcgtgcaatgtatcggcaggaatcttgccttcttcataagctctgacgatcggttctgtcgtctcgccgatgagtatgagttccttcgttttaatgtacggaagcacgtcgtttgcgaactgaatcgttctgtccacacggtcggcgcggcagttcatgataacgatcggttcatctgtcgggtagccgatttcctttacacgtttccatatatttaaagtagaagatgcatcatttgcggcaaagccgtttacgaaatgaccgggctccttcgtgctgagcagcggcaggattctcatggcgccaggatcaggcggcgcattcagcattcctttaaacgccgtttcttcatctatcccaagagcctgggcaacgccgagcgcaagggaagcgttatcaggaaagaccatatattcaaattttcgaaggtattcatctgtaattttagagttatccgcaataatgacctcggtattccgctctgcggctttttctttaaagaagtctgtgtattcactgtctgtaatgacaaggtgaccgttatacggtatcgtcgcggtaaatgcttcagcgatttcatcaagcgtcggccccatgacgtccatatggtcttcaagcacattcacgatgacgccgatgttggcttgaaggagttcttcctgaaagataatctgataatccgggtttaccgccatacattcactgacaatggcattggcgccccgttctacggtttccttcattacttctttttgctcgccgatattcgggccctgcggtttccgtttgatcggtttctcctcaggtgtatcccaatagatcatccttgcatctgttcccgtcgtttttccgactgttttgtagcccgcctccatcagtattccggtcgtcagcctcgttacggttgactttccgcggataccattaatattgacgcgtactggcagagcatcgatattcttctgatgccgccttttttcaatgattccgatgattagtacggcagcacaggctataatgagtaaccacattgatttttgacatctccttctgtattgataaattcattcatcagtatatagcttcactatgaattctcaatcggcattatgtaacataatcttcccgctttcactgagccaaacttctctattagtgacgctattcttcctattatcgaattgctttttttgggaataggcaggacttcaaccttacttcaatttttcaaaagaaaaatgaatgcgtttacattttcacgcagaaattcatttggatcaatggaactattcgcgttccggaagaaaaagatgtaatgataatccatcttttccagcccgtttgtatcagcgtttttcgcactgcgcatacgtttcgggactctctgtccgctgtgtgcagactgcctgttttgttaaggataaggtcttaaagtcattcatttttcccccgtatcctgctttcagtcccattccaaaataactagcggaatgactggtacatgacagaaaaagacgggtccggagtgtttacaagaaatacacattttatatgcggaaagcctttctccttttaaaccatttacaggacgtttatcactcttttgaaataattttaataaatctttatattcgttcaagaaatattcatccataattgtgaagttcttggtaaaacatcgaggaactcctctattttataaaatgcataaaaaaggaatacccgctgaaaactacagataaccggggaaggaggcggtctgatgtctgcggataaacaaaacaaacggattcccggcgattttgaatcggctgtacgggaaatgcaggagctgatgtgtgtttgcggtgattttaaaatacgaaggatcaaactgcaggaccgtcataccgctttcttttatattgaacagatgatagaagaacagaagctgaatgagtttctgttaagcgacaccctgcagaacggcccgcttgaggaaacgatgaatgccgtcagcagtgcggaaacggatgaaaccagaaaactcattgacgggattttggccggacaggttgtttttctcagcgatgcatcgagaaaagcgaagctgttttccgtcgggcagaatccgctgcgttccattatggaacccgaatctgaaagtatcgtccgcggcgcccatgacgggtttgtggaaagtttggaaacgaacattcatcagctgcggtttcacatacaggatcgccatctctccgttcattatatggatatcggggaaagagccaaatcaaaggttgcggttatctttgttgagaatatcgccaatccggagattgtcgaggaagtgaagcggcgcctgtcatacttgcgtatagacagcgtgcttgcgcccgggattatcgaggaatcaatagaagataattcgttttccatttttccgcagatcattcatacggaacggccggataaagcaaaagcatgcgtgatggaaggctgtgtactgatcatgatggacgggagtccgtcggctttgattgcgccgatcacattcttttctttttttcaatctccggatgactacagcacgaggtggatttccgccagttttttaagagtgctgagatttttcgcctttatgatcgcgattacgctgcccgctttttatatcgcgctgattgcgtttcattttgaagtcattcccaacgatctgattatcaccatgaaaaattcaattgttgatattcccttccctccgctgatagaagccatgattatggagattacgattgaactgatccgcgaagccggtatcaggctgccgaaaccgatcagtcagacgatcggcattgtcggcggtctagtgatcggtgacgcagtcgttcaggcgggactcatttctaatatgatgattatcgtcgtagccgttacggccgtttcttcttttgtgcttccttcatatgaaatgagcacgtccatccgaacgctcagatttccgcttatgtttctggcatcctcgttcggttttatcggcattgcactcggcttcgggcttattctgatgaacctgtgcaagcttgaatcactcggcgtcccttatttatcatctctgacgccgtttcatttcagcgacttgaaggatgcatttatccggctgccggcttggtttattaaaagaaggcctttttatttgagaccgcaagactcaaagcagatgaaacatgttcgggggtggagaaaagatgaagcctaaaaaaataagccggcttcaaggcgtgtttttcattaatcagacgcagatcagcatcggcattttggcgttgccccatttactgatgatgaaatcgggaagcagcggatggatttccattctgcttaccggattgctcgtccagcttacattcagcctgtatatgatattatttcaccggtttccgaagctgaacctgtacgaaatgctggaggaggtgttcggaacacttgccggcaaaggggtgcaggtgctgtatattttatatttcgcgtttctctgcacgctcattctttctgtatttacacggatattggatatctgggtgctccctcagactccgaattgggtgatcagcttaatgctgatcctcggttctgtctatatcgcccaggctccgctgaatgcgatcgccaggttcagctttattttaacgccgtttttgctgctgatctctctgccgcttttatacacgctgggaaaagccgatatcacatacattatgccgatttttcacggaaccgcaaaagacatgcttaccggggtgcagcaaacacttgtcagcattaccggctttcaggcggcgctcgtgatcgggcccctaatcaactgcaccgtcagccagcgctacaaaatactgacgatttcaaacatcttgattatcctttattacctgtatatcacccttacttgctttgtcacaatcagccccgaagaaataaaaatgatcccggagcctgtgctgtacctgttaaaaaccgtttcattcagaattatcgaacggacggatctgctctttttgacgttttggttcgtgaccgtcttttcaacgctggccaacgtgttttacttggcaagcaccggcattgccaagctgttcaatcaaaaagatcacagccggtttgtttatccgctggccctgctcgtcttccttctgtctatttgggccacaagcacagataaaacgatacagcagctggatcagtttttccgcatttccgatattgtgtttgtgtatttgtttccgttgtttatggtattgattgtccttgtacgcaaaaagggtgtccgccatgcgcattaaaaaagcggttcttatcagtctcatgtgcgcaagtctgacacttgcgggctgctgggatcaaaatttgctgaaagatatttctctcgtgctgaccgcaagccttgatgttgatcatgacggtaaaaataaaatcggcatcacctatcggaaggttcagtcctcccaggcggaacaggaaacgggcggctcattcattacgacggtgctcagcgcttccgggcacaccatccgtgaagcgcggtttcaattggataagcttgtcgatcagcgcattgacacgtccaagcaaagagtcttattaatcggtgagaaaatggcggaaaaaccgctttttccttatctcgatgtcttttacagagatccgaaaagcccgcttctcgctcatccggcggttgtaaaagacggcgaggcgattgaagtgctgaagctgatcgtccggcagaaattgatcgtcagcaagtatttaacgaatttattaacaagcgctaatgcggaatcaaatatcagcatggagaatttgcaatccatccgttcaagcatgctgacggctgataaggatttcgccctaccttatttatcgattaacggacagacgataaagatagagggttctgccctgttcagcggccagcggaaagtgactgaggtgctcggtcaggattcaaccctcctgacccttttaagcgggcaatttaataaatcggctaatattaatctgaagctgtgggacaaatacaaaatggatattgaaaattatctttctctcggcatcacggatgccacgcgaaagattgtatttatagatacagatccgcagcatataaaagtgaaaatccgtttaaaactgaatgcacgcgtcttggaatatccaaaggacaagctgaattcttatacggcaatcgaccaaatgaacaaacaagcctcagcaaatttgaacagccaggccagatcggtgatcagccatattcaggagcacaactcggatatcctcggcatcggccggaaatatcaaacccattattatgagcggggcaagcggctcaattggcgtgaggtctatccttccatcgagatcgtccctgatatcaaagtgaatatctcacaaatcggcatcgtgaactaaaagagaccccggtctctttttttgttgccaaccgaaatgattcgtgttactctttttatgtaaacggttacatagttgaaggaggagtgtttgttggcaacgattaaagatgtcgcaggcgctgccggcgtctctgttgccacggtctcgcgtgtcctcaatgacaacggctacgtgcatgaagatacacgaacgaaggtcatgcttgccatggagaagctgaattattatccgaatgaagttgcccgctctctttataaaagagaatccagactggtcgggctcttgcttccggatattacgaatccctttttccctcagcttgcccgcggcgctgaagacgagttgcagcgggaaggataccggctgatcatcggcaacagcgatgaagaattggaaaaagaactcgactacctgcaaacatttaaacaaaatcaagttgccggtattttggcggccacccattaccccgaccttcccgaatacagcggcagcctttacccggtcgtatttctggaccggacaaaagaaggcgccccatccgtattcagtgacgggcgggcaggcggaaaacgggcggctgaggaaatgcttcgcggcaaaagcacaagcatcacgcttgtcaaaggcccagcccaccttccgaccgctcaggaacgttttaacggcgcacttaacgtgctgcaaaaagcgggcgttcagttcaatgtcatctccgccgcttcattttccatcaaggatgctgccgttttagcagaagaattgtttgcagtatacccggaaaccgacggagtcattgccagcaacgatattgcggcggctgccgtcctccatgaggcgctgcggctcggcaaaaaagttccggaggagattcagatcatcggatacgacgatattccgcagagcaggcttttgtttccgcctctttcaaccatccgccagcctgcatatgagatgggaaaacaagcggcaaacctgctgctgcaattgataaagaaagagccgccgaaagagacggccattcaactgcccgtgacttacatacgaagacaaacgacgagaaaggatgatcaccatgagtgaaatttgtgttatcggaagctgttctatggatctggtcgtcacatccgaacggcgtccgaaagccggagaaaccgtactgggcacagactttcaaaccgtgcccggaggaaaaggcgcaaaccaggccgtagccgcttcccgccttggcgcaaacgtatatatggtaggaaaagctggaagtgacagctacggaaaagcgattattgaaaacctgaaggcaaacggtgtcaatacggactacatggaaacggttacacataaaaaaagcggaacggctcatattgtgctcgcagaaggagacaacagcatcgtcgtcgtaaaaggcgcaaacgatgacatctcccccgattatgccaaaagtgcgctggcaaaacttcccggcattgatatcgtgctgatccagcaggagattcctgaagaaaccgttgaagaagtgtgcagctactgccgcgcgcagcaaattccggttatcctgaatcccgcgccggcccggccgctgaaacaatcgacgattgaggatgccgcatatcttacgccgaacgaacatgaagcgtccattttatttcctgaccggacgaaagaagaagcgctcgccggctatcccggcaaactgttcattaccgaaggaaaacaaggcgtgcgctactcagacggcaccgcggaacggcttgttcccgccttccctgcagaagcggtcgacacgacgggagccggcgatacctttaatgcggcacttgccgtcgcactcgcggaaggacgggacattgagcaagcgctcctgtttgccaaccgcgccgcctccctgtccgtgcagcacttcggcgcccaaggcggcatgccggccagaaaagaagttgaggagctgctgtcatgaaaaaacacggaatgttaaacagccacattgccaaagtattagctgatctcgggcatacagacctcatcgcaatcgccgatgcgggtctccccgtccctgacggcgtccctaaaattgatttgtccttaacggcgggcgttcccgcctttcgggacgtgaccagcctggtagccggggagatggcagtcgaaaaggtgatcgccgcttccgagatcaaagacgcaaatcctgagaatgcaagtttcatagaaagccatttctcagcgcagacgatcgagtacatgtcccatgaggaattcaaacggctcacacagaaagcaaaagccgtcatccgaacgggtgaaatgacaccatacgccaactgcatcctgcaggcgggtgtgattttctagaaagaagggatccagcatgcacatcggcatgacagacattcataaagcattcggcaaaaaccaagtgctctccggcgtctcatttgagcttctgccgggagaaatccacgctttaatgggagaaaacggagcgggcaaatcgacgttaatgaatctgctcaccgggctctaccggctcgacaagggaaacattacgataaacggaacaaatatgagcttctccaatccaaaggaagccgaaaagcacggaatcgcctttatccatcaggaactgaatatatggccggacatgacggtgcttgaaaacctttttatcggcaaagagctgacgacggcgttcggcgttttggaaacgaagaaaatgaaagcgctagcaaaatcacaacttgaaaaactgggagtctctcttcctcttgaccgggaagccggacaatgttccgtcggacagcagcagatgattgagattgccaaagcgctgatgacaaacgccgaagtcattattatggacgaaccgaccgcggcgctgaccgaacgggaaatcagcaaactgtttgacgtgatgacggcgttaaagcgggacggcgtatccatcgtctatatttcgcaccgaatggaagagatattttcgatttgcgaccggatcaccattatgcgggacggcctcactgtcgatacggcgcatattaaagacactaattttgatgaagtggtcaaaaaaatggtcgggcgggagctgaccgatcggtatccgactcgcacgccgtcactcggcgataaggtgctcgaagtgaaaaacgcctcaaaaaaaggaagcttttcacagatcagtttccatgtgagcgccggagaaatcctcggcgtttccggcttaatgggtgccggacggacagaaatcatgagggcgctgttcggaattgacaggctcgattccggagagatctggatttccggccgaaaaaccggcattcggggtccgtacgatgccatccgtaagggactcggcctgattacggagaaccgcaaagatgaagggctgctgctggatacgtccattcgtgaaaatatctcattgccgaacctgaccagcttctctccgaaaggcatcattgaccgaaaacgcgaggcggagttcgttgagctgctcatcaagcgtctgaccattaagaccgcatctccggaaaccgccgcccggcatttatcaggaggaaatcagcaaaaagtcgtcatcgccaaatggatcggaatcggcccgaaagttctcatccttgatgaaccgacaagaggcgtcgacgtaggcgcgaaaagggaaatctattcattaatgaatgaactgaccgatcgcggagtcgccatcatcatggtgtcttccgagctgccggaagttctcggcatgagtgacagaatcatcgtcgtccacgaagggcgcatcagcggagaaatcaatgcggccggcgcaacacaagaacacatcatgacacttgccacgggagggcagcagtatgaaaactgaaccaatgacatcaactgaacaaaagcgattttccattcacaccttcacacaaaaactcggtccgtttctcggcttactgattcttgtgctgatcgtttccgttttaaacccgagttttcttgaacccctcaatattctcaaccttcttcggcaggttgcgattaacgctctgattgcattcggaatgacgtttgtcattttaacgggaggcattgatctctctgtcggagccatcctcgccttatcgagcgcattggtcgcaggtatgatggtctcaggcatcgacccgatcttagccgtcatcatcggctgcgtaatcggcgccgtactcggcatgataaacggattattaatcacaaaaggaaaaatggcgccgttcatcgccactttggcgacaatgaccgtctttcgcggactgaccctcgtctatacggacggaaatccgattacaggactcggttcaagttacgcatttcaattattcgggcgcggttattttctcggcattcccgtacctgccattacgatgctgattgcatttgcggccctgtgggttcttctgcacaaaacaccgttcggccgccggacatacgccatcggcggcaatgagaaagcggcgctgatatcgggaatcaaagtgccccgcatcaaaatcatgatctattctctgacaggtttattatcggcgctggcgggagcgattctgacatcacgcttaaattccgcacagccgacggccggggaatcatacgagctggacgccatcgcagcggtcgttctcggcggaacgagcctgtccggcggtcgagggcgcatcatcggtacactgatcggggttttgattatcggtacgctgaacaacggcttgaaccttctcggcgtatcatctttttatcagctcgtcgtcaaaggaatcgtcattttaatcgcggtgctgctggaccgcaaaaaatcggcatagtaggaggaccattatgaagaaagccatcatcacgatcgcggcattatcactgtttttgctgtccgcctgttcacttgaaccgccacaatgggcaaaaccgtcaaacacaaaacataaaaaagaattcactatcgggctctccgtctccacattgaacaatccattcttcgtttcattaaaagaaggcgttgtaaaggaagccaaaaaacggggcatgaaggtcattattgtcgatgctcaaaatgattcatctaaacagtcaaatgacgtagaagatttgatccagcagggagtcgatgcgttgctgatcaatccgaccgattcatcagcgatttcaacagccgtcgaatcggcaaattccctcggcattcccgtcattgcgcttgatcgttcagccgaacacggcaaagtcgaaacgcttgtcgcctctgacaatgtcaaaggaggagaaatggcggctgactacctcgccgatcagctcggaaaaggcgccaaagtggcggaattgcaaggggtgccgggcgcatccgcgacacgggaacgcggaacgggctttcatcatattgccgacaaaaagctggatgtcgtaacaaagcaagcggcggattttgaccgtacaaaaggattgaccgtcatggaaaacctgctgcagggacatccggatattaaagccgtgttcgcccataatgatgaaatggcactcggcgcgctcgaagcgattaacagctcaggcaaacacattctggtcgtcggtttcgacggaaataaagatgcgatttcttccattaaaaacggaaagctgacagccacggtcgcccagcagccggagctgatcggaaaactggcggccgaagcggcggagcaggtgctcaaaggagaaaaagtcaaaaaaaccatttccgctccattgaaacttcaaacacaaaaataaccggccgatgtttagacttccggtaaaacgtgaaaggatgaagtaaaaggagagatacagatgaagaaaacagccaaagcggcatccattctgacccttgcagcgggaataacagcggcttcagctgccggaataacgcctcttcccgagacacacgcgcaagaagcggtcaaaattgacgatctgtacagctacccgcttgactcttatctcgtttccgcggaagcattgaacgtcagaacaaaagcatcagcagccagtccgagagctgatacccttcatttaggcgacagcttaaagatcgtttcattccagaacgctgactgggcaaaagtacattataaaaacggaaaaacaggatttgtatctactcattatattgttaaagaagcaacaaccgtaaaaacaacggcaaaaacaaaagtatatacagacaaacaagcggtcaaagcttcccttgctaaaaacacgagcgtttctttcctcggatggaaaaagacagccggcggcggcattgacttcggctgggcgcttgtcgattacgggggcgcaacgggatatatcagcacaaaagatctgcaaaaactgacataatatcaaaacggatttcgcaaattcagcgcgaaatccgttttttctttcttgagcagtcagaaacgtctaaggttcgaaatatttctcaggaaatattgtcggatgaagatgaatgcatacgactctaaaatggcttctttatgtaatccgccaggcgtttggcattgtcacggatagccgcagcatcggcgctgctaaccccgtacatcgcgaaagccggcaaataggtcatacccgtaaaattagccattgcctgaaacggccttaagagctcgctcagtgaaaaatggttagacccgcctgcctgatatgcatcctctccggcacctacggaaacagccagcagcaattctttgccgtgcagcgcctttcctttggagccgtaagcccagccatacgccagcacatgatccatccatgtttttaaaagcggaggcgcactgtaccagtacagcgggaattgaaatacgatccggtcatactgttcacacagctgccgttccttttccgcatctattttcccgtccggatattctttataaagctcacggaccgtgatttcatcatgattttttaattcttctgtccacgccttattgaccgctgagttgttcatgtcaggatgaaccgctaataccaatactttcacagctaccacacctttcccttttgactgtattttacctaatctttgccggttcagccaaataaaaagaaagcccccgagaaaaatggggctttcttttttaatttattccgggcttccttcggttgtttcgatatccttcgcaaaattcggattatctaaatttgcgttgaaaaagtccgccgtattcggaagcttgaggttcatattcattttttgagaaatggtcactttacaatctttaatgacatagtcaaatacgtgtccgccggaattgcgtccttcatcaatgaagtgcaggtgatatccggaaacagcgatgccgtttgcgtaccccggcgtccagaagccggcgattgtaccctgaatgtcgtcaaagttgaacacaggctgtgttttcaccgcttcgatcatcggaacgtacggtttctcctggcgttctaccgttcttgtctgcacctttttaaatacgccgtctaaacggatcgcataaaataagtttttactaggcagaaggctggcgatttcctgctcgaattcttcacgggtcatttcgccgtcgatcgtatgcgtcatatcaggcgtgaaaaatgtgaatgagcagaatggtgacaggtctccgcctttaacaggcgtagccgttccgtcgccgcgcagacggtaaaattctccgtcaaatccgattaattcgccgtccaatttgttgaacgtgccgattccgaaatcaccgaacttcggaatgtcagccatatcaaaatctccgtcatatactccgtccagcagagatgtcattgttgatacttgatagatctgatcctcaggtgagcctttttctccgcggctcatcatatggatgtcgcttgcgtttttcatattcccttcactccttttaaattgggctgttttagaaaacaggtcatggtgcgcagagtgctagagagcttttgctttcattttttctttgaattgcttcggaagcatgtcgcttgataaatggacattgtcactgtaatcgacaggaatgtcaatgatgacagggccttctgtgttcaagcctttttgcagcacgtctgccagctgttccggtgactcaacgcgcaagccggtggcgccgaagctttctgcatattttacgatgtcaatgtttccgaaatctacgcatgatgtacggttatattttttcatttgctggaatgcgaccatatcatatgtgctgtcattccatacaaggtgaacgatcggcgcttttaagcggactgccgtttccaattccattgcagagaacaggaatcctccgtctcctgaaacggatacgactttttcacccggattcaccaatgtggcggcaatcgcccaaggaagcgctacacccaatgtctgcatgccgttgctgatcaacagtttcagaggctcataagcgcggaagtagcgggacatccagatcgcgtgagaaccgatatcgcaagtgacggttacgtcgtcatcaattgcattgcgcagtccttggacgatttgcagaggatgcactctgtcggatttatggtcgcttggcgccttctcgctgtctgtgagcatctgttttaattcgctcagcacttcttgttcacggctgcccatatcaaatgtcacagcgtcgtgttcaatttgtttaaccgtagcggcgatatcgcctaataattctaattccggctgataggcatgatcaatatcggcctggatttcgtcaagatggataatagcacggtcaccgtttacgttccagaacttcggatcgtattcaatcggatcataaccgatcgttaatacgacatccgcctgttcaagcagaagatcgcccggctggttgcggaacagtccgatccggccgaaatattggtcttccagctctctggacaatgtgccggccccttggtacgtttctacgaaaggcagttttgttttggcaagcagtttgcggatttgttttaccgcctccggtcttccgcctttcatgccgactaacagaacgggaagtttcgccgtctggattttcgcgatagccgcgctgaccgcttcttccggtgcagggccttgtttcggcgccggcacgctgcgtacgtttttcacatttgtgatttcattcacaacatcctgcggaaagctcacgaaagccgcgcctgcctgacctgctgacgctgccctgaaggcgtttgttaccgcttctggtatattccctgtttcctgtacttctacactgtattttgtaatcggctgaaatagcgccgcattgtccaatgattggtgtgtccgttttaaccggtctgcgcgaattacgttacccgccagcgccactaccggatcaccttctgtattagccgttaacaagccggtcgccaagttggatgcccccgggcctgaagtaacgagacaaacgcctggttttccagtcagtcttccgacagccgcagccataaatgcagcgttctgttcgtgacggcataaaaccagttcaggtcctttatcttttaacgcatcaaatactgcatcaatttttgcacccggaatgccaaaaacatgtgtgacaccttgctccactaagcaatcaacaacaagctccgccccccgattttttccagaggtttttagttcatttgttgcttttgccaacaccctcactccttattatgcatattaaatataaaattttaagtaatttgtgatattattcactatacactctttggaaattgacctccaatatcaattcgccgtatgattaatatgtttcacgaataattaacaaagagaaaggaatggataaggatggagcttcgccatcttcaatactttattgccgttgccgaagaacttcatttcggcaaagctgcgcttcggttaaatatgacacagccgcctctcagccagcagatcaaacagcttgagaaggaagtcggcgtgaccttattaaagcgcacgaaacgggttgtagagctttcagctgccggagaaagttttttaaaacacagcagaaacgcgatcgaagaaatagacaaagcgattgaaatggcgcagagaacggcgcggggagagctcggccgccttgtcgtcggttttgtcggctcggccacatatgaatttctgccgccgatcattcgggaattccgcgaaaaattcccctccgtcaagcttgatctgcgtgaaatttcttctttcagacagcaggaagaacttctgaaggggaacattgatatcggcatccttcatccgcctttacagcattccgcgttacatatggaaaaggtgcagagcagcccgtgcattctggctttgccgaagcagcacccgcttaccgctaaacagacaatcgacattcaggatttaaaaaatgaaccgattatcacactgtcgaaagaaacatggccgactttatacctagagtttgtaaactactgcgagcaggcgggcttcaaaccgaaaatcgttcaggaagcgacggagtatcaaatggtgatcggattggttagtgccggcatcggtgtaaccttcgtgccttcttctgctaaaaagctgtttaatctcgaagtcgcctaccgcggcattaatcaggtgcagctcacggccgaatgggtcattgcctaccgcaaggataatcaaaatccgattctgaaacattttctggatattatgaataaacgccaggctttattgcaggcggataaggaaaatgcataaaaaagagggccgccgaaagcagcctctttttttgtgcttttatggatttttactaaattggtagaaacgctcagtacaccttacgacctgtacccgtatacatacagtacaactgatcaggagggataaaaataacggggcggcaatgacccatctaaaaggaggcagaacacattacacatattaccgtcattttgaccctgatttctttctttgtgaccattatttttatattttggagacccgggggattaaatgaagccgttccggcgtcgctgggcgccattctcgttttgttatgcggaaccgtttcctttcatgatttgggggatatagggtcaaaagtcaccggagcatcaataaccattatctccacaatgattatggcaatcgcgctggaaagcttcggtttttttaactgggcggcggccaaactgcttcaccgcgccaagggatcgggcattcggcttttttggctgaccaacctgctctgtttttcaatgacgctttttctgaataatgacggcagcgtcttaatcaccactcctattttactattggtcttacaatatctcggacttaaaagacatcagaaaacaccgtatttaataagcggcgtattaattgcgacagccgcaagcaccccgatcggcgtcagtaatatcgtcaatttaatttctctcaaaatgataggcatggacctttatttgtacaccaatatgatgtttatccccggcacgctgggactggtgtttatggcctttctgctgtttgccgttttttaccgccgtttgccgaaacagctccccgatattccggttcattttgactcgctggaacacaaacgatatcatccgcttcagcctccgccagacccgacccaaaacagccgtacgaacatcatgttttgtgttttggcatttgtattgttcgtccggatcagtctgtttgcagcttcttacaacggcatatccgtttcgctcgtggctgtcatcagttcagtcatcctgcttggctggagatggttttatttaaaaatcggaccggcagatttattaaggaaagcgccttggcatatctttatttttgccttcacgatgtacattatcatctacggactgcataatatcggactgacggcgctgcttgttcagtctattgagccttatgtctcacaaagcattgcccacgctgcatctattatgggcattgctacatccgtcctctctaatttgttcaataaccatcccgccttaatgatcagcactttgaccttaactgaaatgtccatcgacccattaaccgtaaaaatcatttatctggctaatattatcggcagtgatatcggatcattgcttctgccgatcgggacattagccacgctgatctggatgcatatcatcagacagcacggcgaaaaagtttcttggtcagaatatatcaaaacgaccattatcgttgtccctctcactgtcgtgtttaccattaccgttttatatgtttggatcagttggatttacctttagctcccatgaaaaaaaactgcctgctgtataagagaggcagttttatcatttatggcaggtgcatggtttttaaatgattcaatttccaaaaaacagtatcgccgtctgcattggtcaattcaagaatattatctgagacatcctgcaacagccccactttattcggtatatctcctaaatccagaataatcagcttcccgatatatctttttaattgttcctcaaaattccggacaaggggcacattagcgggaacaaccggcagctctgaactgtttaatgtatacggcgtctgctcatcggaatagggtgtcagccatttcaaatgatgcatcgagatgaaaagagtcttataaaccggagagaagaaaacaaaataatcatttaaaacacttgtcacatacccatgaatggaacggtctcccgtaacaaatatttctgtgaatctgccttttatatgctggagggtattccggtaagaaaaggaatgttcctgtttttcgggatgcggacttttttttcttgcgtacggttctttattctcttcgtccgggagcgtcaatgtcatcctctgaagatgcagcagcggaatataaagaaacgtccggccgtcatgaatcacaatgatatcctgaccgatatccaaaagagttcctgaaaatgtcgtattccccgatatctcaatatcgacttgtttatccagaaatctgcttaatccagccatttcattcccccctctcccgcgtttacggacaatctttccaatcatttacggccgcgtttccaccgataatctattgtccttaatacagtggcgtagctataagagttctcttcctcccgttttgaagatcgaacggatcttgatgatcttttcgactttttggaggaagtacgctgctcttcgcgtgattcttcttcatgcggcttttcttcttcggcgctctctttctcacctttattctcgtcgtctttattctcctcttttttagctgctccttttgccccttcgctgatgctcttgatatgaaaaggatagatccgcagcacttctttatctttcacaagagtgtagtggccgtcggaattatccacaagtataccttcaactgcttcaggacctccgcggttgatggatacccatttgtggatcaggcgtttaaatatgccgtgaaaatcatcagccatttcaaattccgggcgctcctcctcttggccgtcctcttcttgttccgcgctgatgcttttgacatggtcggcgttaaaatatacaattccgtcatcttctgtttccagcacgagaaaatcatcccctgtttcgtgaagctttcctcttttcgattccggacctccctgattcaattgcaccgtgcgattggtcatccggctgatcaggtcttgaaaatcatcagctttttcacattctgccgcttcggccggcgatacggtttcactcgtattttccgtcacacttttcacgtgtttccattgataataaacgattttattatcaacctgaagagcgatataatccgattgaatgtctgctaatctccctgtcttggactccgggcctccccggtagacagtaatcacttttccttccattgcatgcaaaaagttgtcatcagaccgctgccgcttcgtattgcgtttcatctattgtcctcctagtcatttttctcataatgtaaaaagcataatgcatatatacgtatcacgattattttcgggaactgattcaccagcctatttgtaaaaaatctttcttcatttccaaatcagatattccaccgctctaactcactgctgatgaaggctgaccgctccttaatgtattcgcaaatcacttcaggctcccggtcaaagcaatcaatctcttctttcttatatggatccttcgcgacatgcggcctgatctgctcatacagtgacatgaccttcggcttcatatgttcaatggtaaaccgggtctgaagcgtctcttccaaaagccgtttgtacgctttgcggaaatacggttcatccagaagccttgcagtcaaggtattaaacccttgtattctgacataatcggcctccatccgatcaccatgaatgtctcttccccacgtcgcatcgtaatcccacggaatgacttcaaaaagtcccgtttcatgattccggtacaaagcgtaattatgaacaaatccatcgtagtttgaggtaaacacgatgcccgcaagccaccgcaaatacttatcgacgtccaagtgtttgacgatctcccccttgaactctgacttcggcacggtattaattttatagatcatatcctgcaagtataaatcgtcttctttcgttcccgttttcttttcataaccaagttcgagcgatgttttcgtatcccgctccagatcactgacgagggagaaattggcgtcgtcatcaaccgcgtaaaaaacagcgccgtccgccaaattccgtttcgccagaaaatattcatccactgactccagctcaagatacaccccctcatgtctgccattgatttgcagggttacgaaattcgcctttggtgacagcgtcccaagctccgcgaagaaatcgagagacagcttattccgcatcatcgacggatctttgtattcagcgtttaaatgtatctctttcgccctgcgaaatgttttcggcgaataaaaagcgatatgatacgattttttcttaaaatctcttatatgagagccgcggtacgccagatcaatgtcaagccgtttttgattcactctcagcaccgcgggcaccggatcatcatcccaaatgtcttttttcagctccattaagtctttcgggtgaataaacagctggtatagaggcaatgttgattggtctttcatcggtaaacctccctgtattaatttaggctgtgctttttatataaaactcagcgaatcacacatacacttttttcattcatgcgtactatgtggtagtaaggatcgcatccttaaaacatatatcatgaggaggtttcaaaatgggccactattcccattctgatatcgaagaagcagtaaagtccgcaagcaccgagggattggaagattatttgtaccaagaaccaaaaagcagtaagaagagaaaatctcgcaagcataaaaaatcccgttctcacaaaaaatctcgtagtcataaaaagtcccgttctcacaaaaaatctcgcagtcataaaaaatcgtgccgctctcacaaaagatctcgcagccataaaaaatcccgttctcacaaaaaatctcgcagccataaaaaatcccgttctcacaaaaaatctcgcagccataaaaaatcccgctctcacaaaaaatctcgcagccgtaaaaaatcatgccggtctcacaaaaaatctcgcagccacaaaaaatcatgccgccgcaagaaaaaacgcacgcagaaaaaaacttatcgtcctcataaaaaagacccttgcaaaaaagacgattactgcagcaaaacagagtactggaaagacgggaacatctgggttgtaaagaaaaactacaagtaacaccattcgtaaataggctgccggctaaacggaagcctttttcctcaatcagatatatgccacgtgataagatatgcagccggttttcttttgttgtgtttccgaattttctttctgtataatcaggtcatacgataaagaaaggcggccgaaatcatgcatatcttacgagcagacgaactgaacgcaaaagacacttacaaattgctttcgggcacagttgttccccggccgatcgcatttgtcactacgcggtcatccatcaacggcgccgtaaacgcggcgcccttcagtttctataacgttgtctccgcagaaccgccgcttctggccatctcagtcagccgcgcggacggtcggcagaaagacaccgcgagaaacgcaatcgctcatcgggaattcgtggtgcacgtcagtgatgagtccattattgaagacattaacaaaacggcggcaaggcttgatcctgatgtcagtgaacttggcatgacagacttttctgtgacagacagcgcttgcatcagcgttcccggtataaaagaagcaaaagtgaggtttgaatgtatactcgaacgccatcttccgttccaaaatgacagcggagaaacgacgacagacctcatcatcggcagagtcgtttgttttcatttgaatgaccaagtatatgacgccgataaaggctacatacggacagatgagctgaagcctgcggcaaggctcgcggggaacgaatacgccagactcgggaagacatatacacttgtacgcccgacctgaagcaggaaccattataatagaagaaactagtcaaaaagacccctttcgtaaggggtcttttttgagtcttttaccatgtaactcagcctaatgtcttatagaatgccgaaacttacaaggccctcacccgtatgaaacgagtgacacatttttaggaggcagacgatggatttcattcagttactggttttttcagccgtatttattttgctcagccttatgtttcaagtatttgccgtcaaagttctcaatttgccaaagcctgttaaaaagcagaagccgataaacggcacacatcgattaatcgaaatcacactgcttattacgggcatcgcagcggtgacttttttcaatgaaatgtacgtatttgcgggagttgttttcatgctatttttctgcagcggcttaatggaatggcggcaccggcgggaggaaaagcaaaatgtgtacgattctttttacgcgggtctttctgccgcgcttggcgtgcttatttttttcatcagttagcgtagtctatactcctgcggccgctccgtcgccgcgcgggtcggccccgccttggagaaagccttcttcatcaatgacgatcgctgccgcatggcccataagcccgtcaaaatcaccaacggtctcgacgcggtggccgctctgccttagggcttctctcgtttcagggctgattctgctttcaaccctcagcccttcatactcctctccccatgtccgtccccagacccagcgcggctcattgatcgcctgctgggggtccattttgtaatcaatgatgcgcgtaatcatcgctgtctgagtttgcggctggccttctcctccctgggttccgtacaggatgtgaggctttccttctttacaggtcatcgccggcatgagggtgtggaacgtccgcttgcagggttcaagtgtattgacatgggatccgtccagcgaaaaaaatgacccgcggttttgcagcagaatgcccgtctcccccgctgtaacggcagatccgaactcgaaatagaggctctgaataaaggaaacggcatttccttccgcatcggcgacggcggcataagctgtgtcgcttccgaccggccggcttaccgccggcgcagccacgttaccgatttcttccgcgagctgctttgcataccgtttatcaagcagccgatccagcggaatatgagaaaatgccggatcagtcagcacttcattccggtgctgaaaactcttcttcagcgcctcgatcagcagatgataatagtcaaaggaaccgtgttcaatctgagaaaaatcatagttttccaatatattgagcgtcattaagcctgtaaaaccctgtgaattcggcggagcctgatagattttgcacccgcggtaatcggaggataccgggttcgtccactcgccgcggtgggctttaaagtcatcaagtgtcagacggctgccgttgttttgcagaaaggatgtgatgcgttgagcgaggtctccttcataaaaagcgcttctgcctttctgggcaagctgctccaagctggccgccagatccttttggacaaaccgttcaccgggcatgggcgcttttttgtttctcgtaaaaatggccgaggtgtaaggcatcgaggctaaaagagcgagattgcgttctgtgtgggcgcactggtcggcggacactggaaatccgtttgccgcataatcaagagctggcttcagcacctcagcgagagaaagacgcccgtacgccgaaagcacggcatcccagctgtccgccattcccggaacggtaatggcgctttctgtcccgcgcagagggatcgcttctctgccccgatacaagtctctcgtcacatgcttccctgaacggccgctcccgttataagctttgattcgtcccgtttctttatggtaagtgagccaaaatgaatccccgccaagacccgtcatatgcggatacacgactgccagacaggcgctgaccgccactgccgcgtcaaatgcgtttccgcccttttccagaatgccggcccccgcctgagaagcgagataatgcggactgacgaccatttgtttcgttccgatggttgaagtattcatggcaagcccctttacaaattttctcaagtataaaaagcggcttcgcggccatccacattcctgaaagaaaatctcacacactatttacttttcgataagaaataattctaagttattacgtatcgaaaacaataaaaaatttctcccttcataccgtaacgtttcatgatacaataatgtctaccaaatgaaggaaggtgaagcgggttggaacatgaatacagcattccgaatcttgtccttgatgaaacggataaacagattctttcgattttgcacgaggaagggaggatttcctatacagacgtaggaaagcgggttaacctgtcgcgagtggcggttcagcaccgcattcagcatttactggatgccggtgtgattgaaaaattcaccgctgtcatcaacccggcgaaaatcggccgccatgtgtccgtgttttttaatgtggaggtggagccgcagtatttggaggaaaccgcattaaagcttgaaaaggagccggccgtgacaagcctttatcatatgaccggaccgagcaagctgcatatgcacggcattttcgcaaatgatcaggagatggaagagtttttgacaaaacggctctatacgcaaaaaggcgtcgtcagcgtcgactgccaaatgctgattaaacggtataaaagcagaacgggcatgaagctgtaaggaggacatagccatgaaacatccctattgggacattacggcggcgatggtccgaacgggcattctcggattcgggggcggcccgtcggtgatcccgctcatccgccatgaagccgtcaataaatacaaatggatagatgatgatgaattcggagaaatattagcgatcgctaatgcgcttcccggaccgattgccacaaaaatggctgcgtatctgggcttcaagctgaaaggcacgttaggcgcaatcttggcaaccctcgcccacattctgcctacatgccttgctatggcgggcttgtttgcggctgtcaatgtcttaagccactcagcaattgttgccggcatgattggcgccgtaacaccggtaatcgccgtcatgctcggcattatggcgtacgagtttggccaaaaagcgcttaaaggtttcggctgggtcacgggcattctgttttttatcatcgcttttatcggcctgcaaacgctgcagatcaatcccggctttgtcattattattttcttagcgtacggcgcgtttcattttaaattgaaagacaaaatcacaaataaacgttcaaaagataaaggaatgtctgcctcatgatcatgatttatgtatttatggcgttttttgtcgcaaacgtactcggatatggaggcggaccggcgtcgatcccgctgatgtttgaagaagtcgtcaacagatacagctggctctcaaacgatcaattctcaaatatgctcgcgcttgcgaacgcattgccgggcccgatcgcaaccaaaatcgcggcgtatgtcggctacagcgcaggcggatggcccgggttcctgattgcgctgatcgccaccgtcgtaccgtcggcgctcgcattgatcgtcctcttgcgcatcattcagcgcttccgccaatctcccgtcatcaaaggtatgacgctgtccgtccagcctgtcatcgccgtcatgatgctcattcttacctggcaaatcggcgcagacggcatcaaagcgatcggctgggttcaagcgataatgattgcggggatttccctccttgccttgacaaaattcaagatgcatccggccttcctgattatcgcggcgtttttgtatggagggcttgtggttcctcatttataaagaaaagcacctggacaggtgctttttgtttcagtcccgatatgttgttcgatatagataactgtttcttcgtctatgcttcttacatgtggttcctgtcatcctcccagatggcctgatcaataaaaaacatttgcagcctcccggactgcaagtgttacacgtgatttttccgataaaacgttcgcaaaacatgcgtttcaaggtcaaccagacggacagggatcggcagcctgctttcccgattgatcattttcattgtgatctgatagctgctttctaaatcaatgtatgtccgcaagacaagaagataggcttcacgtcccgccgtgtccgaagcgcccggccatatacctcgccgtcaatgagaatatcggtgtaggcgccgacttcattttcaggcatctcaaaatcgcagcctttgattttgagataggttttcgcaatcccaatcgtcggctttcccagaaaaaaagccgcatgggtggcaacgcccatatgattgtaatgcagatacccgttgccatcaaacaaaaacacatccggctccgcctccagctttttggccgcttcgatgatcagcggcagctcgcgaaacgcgaggaaaccggacacatacggcacactgattttccccatgctgtgcactttttcaatcacttcttttgtatcagcgtcaatcacgatgatactgcatacgccgtacggttccccgtcctgatcccaataagcgaggtcgacgcctgcgcaggttgacggagtctggatggatgacgggggataggttgattttatgtattagggattgttgtgtttgaacaaattcttctttgcttagtttgaaaagatgtatttgtttaacatgcatctaaaatcaatcctacctcttgttaactagtgtcttttttttgtatttattttcactttaaaaattctagtttaaaaacttgcagcttcaggccctgcaagcttttttaatagtttaaatgaatgtttaactacatttcattattcgtaactttgtttaataaagattctatattttcaactatttcaatatggctatttgactgaaattcacacacaggttgatcccaatcctcattttgtatcaaaactagttgataaaatccattagcatccgcatctggataccaccctaaatcaagtaaataatttttacgagagtatgttaattgcaataaatcttgtgaaaaaaataaccacttttcatcgtctggatctaggtttttcggatcaatttctctaaaactgttttgatttatggtccacccttttggaatccttaaggattgtaaacttacttctggcattttttttatctttctcataaaagcctcctattacttatcaataccaagttgttttaaatacttacccaatcgacttccagcaatcggatgaccatgatattcaccaccagaaaactccgctctaatccagcttgttggtgtacctagatcataaccgactgtttttcctgcatcataaataaaataatagttgttatttccattatcaataatatgaccttttagaagtgcctctttctctaaagctttgttattcacatttggtaagtactgagcagattttttacctgtcatactaaaacgttttgcttcttcaggtgttttagccttaacatgtttatgtccatgcggagtaaacgaagcattattaagcatcgttctaaattctttgcgaccataatatccatcatgcgctactttatcgtgatttttagaaatattaggactatgagattttcccttacggacgccatcactaaccatcttcacaatcccaagatctttcacagcagtcgttttcacatcagcatgaatgattgggaaagttgcgccatctggtgtgacagtcttgtggacacgaatttttacattcgtcggtactttgaattcttttacttggtctagaatcttttttcctttttcaactattgatgcttgtggcgattttgcaagcggtatgcctttgtttacatgcttcgccaatgcaccggctccaaccaaactcagcgcagcttccagcgccccttgcttccgcttctcctcggacactttgtttccgaacatatctctgcctgtgacggcttctgagaatccgtttgaggcgacaaggccgtatgcgcccatttctgtcattttgagaatgtctaaggattttccggttttataggcatctaaagcatgttctgcggcaatgacggtttttccggttttgtaaatggcttttccgcctttgaaagcgcgacccgcccagccgacgaccggtatgaatccggcggcggccatcgctcctgctgtgacgcgttctgctgttgagagcttttctccggtcaccggatcaacgccttcggctgctcttttataatcataatagccggtgacttcgccggtaaagttgcagatgccgtcccatgttttttcgtaccatggtttattggcttcttcttcagccttttcctgaagccgtcttgcttcggcctgctgggcttttgcgtcaatatagtccgttccctgtttttctgtcgccgtgacgcttttgtagatttcattgctgtggaaggcttttttgtcatagtacataggggatgcgcttttcccgttgctggtggcctgcatgagaacagaatatttgctgagcactgcgttgtccagagattctaagttttgatattcagcggtcagggattcatcaagcgtatcgactgccgtgatcgtgtcgcgtctggttttctgggcatcgcccattttatcagcgtaatcatccagcgtatatgtgtcgagatgaataatatcgctgatgcctgacaaaattgaatcgatttctgctttatgagcggagacaatctctgaagctttcaaatccgcgttgggcagctcatgctccaaaaatgaagtctccacatatgtatcgctgagttcttgatctttaatgtcacctgaaatgccatttaaaaacgcaatttgagcagagacaagcgtcagccagctgtcggcgatttccgcttgtccctgaaaaaaatcttttatattgtctgcgcctttccctttcaaagcatcacccagatcggccacgccttgaaaggcttgtttgagcgcacgcagctgctcttcaagggcttcgtattgtttctttctcttatctgcttcgtccgttaacgattgtgattcaaacactttgctcatcggcaagtcctttctttcgttattttacggcgatcgcctcgtcctgttccttcaaagaatctacgttgtctttaacgtccgcgatattcttatgaacggcctgcttgtattcgctgatcatcgatacaagctttgcctcgcgggattggtatttggaggtatagtcgagcttgttttttccgtttgaaccggcgttcccgatcgagacggcctccaaagcgctgctgacggattcaagctgcttcatgacggttccgcatttgagttttatttctgccattaaaaccaactccagcttcttttgattgattgtattttttctccgaccgtgtcaagggcttcttctcccagcgtcagcaggtgctctgcctctctcgcaatgcttctggcggcaaggagccctcctttttcaatttcaagctgtgtcatctttaagccgattcggtaaatataaccgtcgtatttgtctgtgacgattctgtatgcttctgtatgggcctgatcgcgccggtcatcaaattcttcagcaaaagtgccggtccaatgatggtccaggtgcggcctcaggatgtccctgatttcagatacgccctcttcctgcagagattctatctctcttttcgcttcttttaatttatcaatttggtgttcaacctcgcccagtttatggctgatcgtgctgttaatatggcttaatgtgcttgaatggctcatctgttttcacctcgtcttacgcaaaaagtcgtacaaaaagcacagacttttccatactatatttccatatattatattttaaaatagacagaaagcagcttaaataggttaaatggcttattttcagcagccgagatgctcaccattaacgccaaaagactcacataaacggcatatccattcattgatctcctctatgtatccatgataaattccctaaaaaaaggagacagtgattaaccgtctcctttgccttgtatcatgatcatcatactgtcgttaactgcagtcccagttgtacaaaacgtttgagaaatcttttttcttcaaatcttccggtctgataaagaaattggcgattcccacatctccccacatcgaatcaatgtcatcatctgaatcaatttgcaaaagcaggatcgtatggttttgatgggagtaagaccgcggatcttcctgggtgaaggacgcataaccgccgattttatggccgaatgcgttcgccgtatattcgtcatacacctcatcgtcaaactgctcgaaatagtcaaaggcatccatcccggcatactgcctgaattgaaaatcagacgggagcacccattcagcagacagctcaggggtgatcagcgcttctgattgaatcggaaaatcgtactcctcttcaacatgaacgaaagaaaaatcatccatgagctccgcttcttctgctgtcacatgttcaaaatatttgacgcagaaacccgtttgcgcgcacccgtcgtcaaaattcagaccgtatacgtcatcactgaccgatatgtaaaactgaagaatgccggtgtccggaaaatcagggagtccgggcatatccgcaaaattgatttgagcgagaagcttcatcggcctgccgctttcatctttaggatatggttcatgtttcggaaaataggggtctccggcaattttactgtcataccgtcccgtttcagcttttttgacgtgcagtttgataaagcgccgtgctgacgtttccagcagaccgcgggatgattccatttgcttcggcaatttccatgttttttccacgattaatatccccttcgtctctaatgattgtatgataaaaggccggcgcggtctgccggcctttcaagtgacagaatcagtctgaggcacgacggctcttcttccgattgagatatattccacgcccgcctgttccgcttcctcaagcgagtggcagtttctcccgtcgaaaataaccggggtttccatcagctctttgtacgcttcaagcgggaagtgtttaatttgttcccaatctgtcagaatcaggacggcatccgctcccctgacggcttcttctatggactcccgataggaaaccgcagccggaagcagtccggaagcccggaatgaagcgatcggatcgtacgctgtcatccgggcgtcaagagccgccagacgatccgcaatgacaatggacggggcatcccgcatatcatctgtattcggcttaaaagacagccctaataacgcgattgtcttccccgtcacaccgccgagcctgttcagcactttatcaaccagcatggactgctggttattgttgactttaatgacggacttcagcaattcaaaatcatgctccacatgtcccgcgatctgcacgagggcgtttgtatccttcggaaagcaggaaccgccgtaaccgatgccggctcttaagaattgattgccgatccgtttatccaatcccattccgtgtgcgactgattccacatctgcaccgactttttcacatatatgagaaatttcattaataaaactgattttcgccgctaaaaatgcgtttgacgcatatttgatcatctcagcgcttctgatgtccgtatgatataccggaatcgcaagcggcgcgaaaacccggtcaagcgtttcccgcgtctgccggtcttcagccccgatcacgatgcggtcgccgtgaaaggtatcgtgaattgccgaaccttcacggagaaattccggattcgaggcgattgaaatgttcacgtccgctttcagccgtgaatgaataacttcgctgatcctgtcattcgttcccacgggaaccgtgctttttgtcacgacgatcgcatctttacaaatatattcggcaatccgttcggcgacattttcaatataagtaaggtttgcgtgcccgtcttctttttgcggtgttccgaccgctataaaaataacgtccgcttccgcaagccctttttcgtagctcgtttcaaatgccagccgatgccggccgatatttcgtttcatcatatcttcaaggcccggttcaaagataggggacaagccccttctcatctgctcaaccttacgttcgtcaatatctatgcatgttacgtcatggccgatttctgaaagagacactcctgtcacaagaccgacgtagcctgttccgatcactgttattttcatcgtgttcccccaaccgtttagaaattgctgctgggcagcttaccgttattatcatatgatcccgtcgccggctgaatgccggaagcctgaggtcatgataggaaaaaacggcgccggccgctgataatagcataagcataaaagaatcatcttgcaaaacagccgcttacgcttcatttaaacgggatggagacgacgattaaaaaagaccccagcgcttacggcgggccacaggcagcggaggttccttataaacggctttgttttcagcgagaagcgccgcattttccgtgagcatgtaaatcagctcagcccctgcttcttttttcagaacgccgagcgcctcctgataataaaaatttctcggtccgagattatgggcgtcagatgcgagaaagtggatcaaattcgcttccatcagctgcagcgaaaaggatttcgctttccgcccgaatgctccggcaatgcagccggccgtcacttgggcggccgcgcctttcttcacaagactgtataggacggaagggttttcgcgaatttccctgttccgctccggatgggcgatgacggggacatatccgttcagctgcagttcataaaacagcctttcagcgtaggccgggacatgatccgccggaaattccgccagcacatactttgtatcatggagcgggacaagcgagccgctttgaagacctgccagcagatctccgtctgttctgatttcctggccgggcagaacagtcagcggaatgccttccttattcaaacgtttgtttaacaggctgaccgcttcgttgaccgtatgccggtccgtgtcatagcggtatttcacatgatgcggcgtcgcgatgatcgtatcaatcccctgtctgaccgcttctctcgccatcttcaggctttctgtatcatccgccgcgccgtcgtctatggaaggaaggatgtgacaatggatatctatcatatttcaatccctccttaaaaagaatggaccgcgcccattatgacattattgtccgtaataggcgtagtccgaatgtttcgtttgtttcttcccgttcatcacggccccaaggagcttgcacgggcagtaatcgagcgcttctttcgccttggccgctttttccttgtccgttttcccgcttgagatcaccataatggccccgtcagtgtagctgcctaatattttcgtatcggctacggccaaaacgggaggcgtatccaaaatcaccttatcataaacttcggcggcttctgacagaagatctttcatggcacccgtcgataaaagctccgccggattaggcgggatcggcccgctcgttaaaatatccaggtttgcttcatcagccggcaggacggctttctgaaacggcatctgttttaacagcagtgacgttaatccggttccgttgtccaatttgaaggtgaaatgaaccgtcggtttgcgcagatccgcatcaattaaaagcacttttttcccctgctgtgcaaatacgacggcaagattggccgcggttgtcgattttccttcttccggaccggcggatgtgatcaaaagggacttcacctccgtatcaacggaagaaaattcaatgtttgtgcggatcgtgcggtattgttctgagttgatggatttcggctcagacatcgcaatcacgcttcgttttccgggtttgtcttttttacgcgtcaacatgtccgccccccgcttgtttggtttccgccatccttaagtttttggcaacgctgtctttagtactgattgaagtaaccgttcccaggatcgggatgccgagcagcgattccagctgttcttccgatttgatcgtattatccaggtgttccagcaaaaaggcgagaccgattccgcccaaaagtccggcggcaaacgcaatcgcgatgttcagcttacggttaggctctgccggtgactggctgtccgccgcttcggcctttgaaaggatgctgacattatccacgttcataatagcggtgatcttgtcctgaaaaacggctgcaaccgcatttgccataacggccgcccgcttagcatccgtatccctcacggcaatcgtcacgacttgtgaatcctgctcgctggacaccgtgattttcgattccagctctttcgaagtcatggacagatgcagttgtttaatcacctcatcgaggatgaccggacttttgatgatgacattatacgtgttgattaattggaggttggtttgaacatcattgaattggacttctttttgattgtttttggattggctgaccaaaatttgagttgagttttcatagaccggcgtaagagcgaagaaactgatgagtccgcctgcggcagatgccgccgcggtaataataagtataaacagcagacgctttctcagtattgcgaatatttcctttatgcttgtagattctcccatataacctccatatcactttccgcgtattcccattccctccaatgatcttttccaattacgattatacagttttaaactgtcatttctaaccttttcaaatgacaaaattcgacaaaaatagacaatcacttcaatctgttttaattttgtaagcgctttaaatactggtgtcacaggaagattaaaaaatcccgcggccaagagcctgcgggattttatgttgcatatccatttttaatataagaaatcaaattctcaagcatttcttttgtggtcatctcagaggactgctcaccaatgtcgtgcgcatgcattaaaatcttcagaaactcctcttgatctaacttcgttttcttcatcattcgtttcctttcggcttccattaaattgaaaacaagattattatatgctgtcgggtgctgttttgcaatctctaatacatcattcgacacattcgggtttttatgtccttttttaggaaaaactttttccgggccatgtgttgcgatataatagaggaattggaatctttttattttgtgactcgttaggagcgataatcatgcttcaggatatgattgctaaagaagatgtgctcgcagcggctgaacagcttaaagaacttcttccttacaatgaagacaatgttcagctgatgaagaaagcactcattttatatcggcaggattccgtctatcgtatacaggttcaaaccccgacagagatttccgcatatgtgcaggatgttgtgcctgtaagggtcacgctgaacttatttttcatggtgaaaagcggctgcgcatgcccgtctgaggcgatctgccgccacgtgctggccgtttttctttacgtatatgcccaattcgagcgggtcggtacctttaccgaacattggctggaaagagaaaagcttgaggaaagcagggagcttgtccgccggcagtttcaggaaaaagtgctgccgaatgaagagtcgctgtcaagctggctcgctttttttgattcggaattctcgctgtgggaggcgcggacgccggccggaagccagacgatgcagggcctttattacggctatctgtcagcgctcaaaaaacacgccccgaaaaaacccgagcttaaaagcttatatcagattcattcggcgcttgccgtctggcttcacatgttcactttgattgagtcaggcagattggatgccgaaaaagattattacagcatcaatccatacgtggaacagctgatggatacgatttattcctccattgacagactgaaaacgtacgctttgtctttttcactcgatccctttttagaccggacgcccccggtgctccgcagactgcttgtgaaagaagagctttttcaatacgaacgcctccgggtattcggtgaaatgtggagcgcgcttttgaaccggccgaaatgggttgcgcgtgaacaggagattctcgaacaggaaagcgggcgccgtttttcgccggaagtgcggttcggacggcttcatctggcctttttgcaaaaagatgatgaagcggtcttccaagatatgtcccgcttccctcctgaagcgctgccgtatacctttcaatggctcggtgaactcaccgcgaaaaaagactggaaacggctgaaagcttggtatggccggatcgaaccgcttgccgtgaactatacgaagcttgataagccgtttaaagaaatgcgcgacatcatcggagagctgtttgcgctattggcggattatgcgcggcactcacgggatgatcagctgtttgaacggtttgcttccggctgccttccctatacctttaccgaatacagccagtacctgtacgaaaaacggcggtatgcggaatgggtggagattcacagcctcgtcggcttttccgtctgggaaattgaaaaggacatcctgaaggaaattgccgccagtgatccggaagcgctcatcccctcctatcaccgggcggcggccttttttatcgaccaaaaaaaccgcagcgcctataaagaggctgcgcgccatctgaaaaaactgcggacgctttataaaaaggcaaaaaaacagcaggtatgggagcggtatatcagccggctgagcgcaagctacaagaggctgcgcgcccttcaagaagaattgcagaaaggaaagttgattgatggcgagtcttaaggaaattttcattcatgtagaacaaatggaagattggacatttacgctgtcaagccatgatgagaaggagcagccgcttactctcagtcagatgaagactcatttgttccaatggcatgagtccaccttttacggaacgtttcttgaagacgtcagcttcatcggcactccggccgttctgctcagcccgtggatgaccgtcgagctgctcggaaaaaactcgttcaattcattcagcaccgtgcagctgacaaaggaaacggaaccgttaatcgaagcggcttcgacgatatacgaatttattgccgacggcgattttcttccggattatgaggcttggcaaaatggcgtcctgcgcttcaaagaccgcgagcttttgctggaaggctttacggcagactggttctcagccgcggtccaggactacattcagtacaatgatgacctgctggaaaaatggcggcggatcgaaacccgctcgccggccgttcatacgtttaaaggctcctttttggatgaagatgattttctcgagggaatcggctggcatgacgatctgacgccgtttaccgtcgggctccgattaaacgagcctgatttcgacggtgacgactggaaaatcgaaatgtttttacgtgagaaaaaaaccggctccatcaccttttttgacggactgaagggactgaaaaaagcgtggcaggcatacagcggaaaaatcgcgcgcgaacaggaccgcttccgcagaacggttccctggctttcgtttgattcaggaacgacgctgatatctgaagaagaggcttggatcttcttatcggaagcgagtgagacgcttgtcgatatgggtgtggagattcttctcccatcatggtggcagattgtacgggacagcaatatgatgctcaaggcgaaagtgtcatcctcgccgcggggcgagtccttcgtcggcatgaacgctctgcttgatttcaactggagattcgccacaaacggtattgagctgacagaggatgaattcaatgagcttgtcgcaaacaacagacgtctcgtcaacatccgcggccaatgggtgaaaattgatccgcaatttattaaacagatgaaaaaactgatggaaaaagcggaatctgagggcctccacatgtccgacgtgctggcgcgcgaactgatggatcacggggaaaacggagccgaggacacggacatcattgactcatcggcatttgccgggatcaagatcgaattatcaaagcagctcagaagcctgatccgcaaactgacggaagcccgggatctgccggagcatgaagtcagcgccgcgtttcagggccagctccgcccttatcagatgtacggcatgaactggcttctgtttttacgggaaaacggcttcggcgcctgtctcgcagatgacatgggacttggaaagacgattcagatgatcgcttattttctccatgtgaaggaaagcggccggcaaaaagcgcctgccttaatcattgcgccgacatcggtgctcggcaactggcagcgtgagctccagaccttcgcgccgcagctgaaggccgtgcttcattacggtccccgccggccgaagggggaagcatttgtcccggcctatcaggacgcggacgtcgttcttacttcttacgggctctcgcacgccgatcaggaagagctttcttccgtgacatggagcaccatctgccttgatgaagcgcaaaatattaaaaacgcgcatacgaagcagtcccgcgcgatcagaaagctgaaaggcgtccatcatatcgcgctgagcggaacaccgatggaaaaccgcctgacagagctttggtcgatctttgattttatgaacaaaggctatctcggcagtctgaccggctttcataaacgctatgtgctgccgattgaaaaagaccgtgacgaaaaaagaatcaaccagcttcagcagttaatccggccgtttttactgcgccggacaaaacgggatgaagaagtggcgcttaatcttcctgacaagctggaacaaaaagagtttatcccgctctcagccgaacaggcatccctttatgaacagcttgtcaaagatacatttgaacatatggcttctctgaccgggatgcagcggaaagcgctgattctgagcatgctcggccgcttgaagcaaatatgcgaccatcctgcgctctatttgaaggaagaacagacagagctgttaaacgggagatccgtcaaactggaaaagctgcttgatttaatggcggtgatccgcggccaaggggaaagctgcctcattttcacccaatacattcagatgggcaacatgatgaagcgcctcctggaaaaaacattcggagaaccggttcagtttttaaacggaagcctgtccaagcaggaacgcgattctctcgtcgaacggttccagaagaaagaatacccgacgctgattttgtcactgaaagcgggcggaaccggcctgaacctgacggctgccaatcatgtcattcactatgacagatggtggaatccggcggtggaaaaccaggcaaccgaccgcgcctaccgaatcggccaggaacggttcgtccacgttcacaaactcattacgacgggaacgattgaagaaaaaattgatgccatgcttgaaacgaaacaaacgctgaacgatcagattatccaaagtgaaaattggattaccgagctgtcatccgctgagcttgaagaactattcaccctcagcgcatcggcgcaatcacattaaacgcaaaaaggccggctctctcagaagagccggtcttttatgtcgtccttactgttacgccgcatttgccatgaatgcgtcacgccagtcatgaacagtatcgccatacctttcacagtaaattcctgatcatatgcgcaacgccgttttgatcatttgtcaatgtaacggcatcagcgatctctttaatatcttctctcgcattccccatcgctatgccttttccggccgcctgaagcattgaatagtcatttaagctgtcaccgaccgcggcggtttcagccatcggaatgccgagcttttgcgccagccgtttgagcgcctgccctttagaggcgtttcgagacgccagttcgaagttgtgatcggcagagctgacaagggtgagatctttctgaccgctgaatcggtcccagcccgctttcagcttccgctcatcaaacgaaaatccgagaatattataaaaatccagatgctcttctttctcaaagagctcacggtatgaatgaatgtaagcaaagccggactggctgtattgcactgaagccgcctgttccaaaacggaaagatcggtttccggattggcgcttttcacccggtccatttcgatttcgagcagctgcctgccggtttcaggcgtatagatggctttgtttgtaaacacctcatagtaatattgattctcttcaagccatgacaaaatgccgcgggctcttgtttcttcaatcgcatcacagtggtacaggctgccgtcaggagcatgaatggcggctccgtttgcgctgatgacccacgtttttatgccgagcggttcgaatatggagtgcacgtcaaaatgcgcgcgtcccgtggaaaccacgatttcaattcccgcttgccgggcttcccttaaagcccgctcattttcatcgcttacttgatgactgctgttcagcagtgtgccgtccagatctatggcaatcagtttcacatgtcctcatcctcttcttcagattcagttacaagcaattctacgccgtgccggtcgagcagatcgcaaaaatcctgatcaggcagctgatcggtaatcagcaggtcaatctcatgcagagctgcatactgataaaaactcgtacggccaagcttggagtgatcgctcagcgcaatcacctgttccgcctgtcggatcattttacgctttaccatgccgtcttcttcatgcggaatcgtcaggccgttttccgagatgccgacaacgccgatcagcaccttatcggcgtgataatcccccagtttttctacaacggaagccccgtataaaaaccggtgttccttctggagctttccgccgagcaggtgaatatcaattccctcttttgcggaaaggatatcggcctgattgatcgaatttgtaataacagtgcaaccggtgacatttaaatgctccgcgcaggcctgcacggttgtcgatgtgtccaggatgatccggtctcctttatggatcagggatgcggccagcttgccgattttgtttttctcttcagaaacggttttcagccggcccgaatagcccggaacttcctgattcaccgacggcagaatcgcgccgccccgtgttctgataatggccccgcgctctttcagctttacaaggtcccttcttgcggtatctcttgaaatatgaagcagcgaacatatctgttcagcggtgatccgccgatgctgtttcaaatattccattatcgcaatcagtctttcttcttgatacacgtcctcattccctttttcgtcacttatctgtaagtaattataaggttttatcccaatatattcaatgtttttaagtattcataagcgaaatcacttctttttaaccattttttagctcccgcacaaaaaaaccagtctttcgactggcgagtgggaaggaggtattgcggggcccgctgaaaaaggcgggaaatcgaggaaaaaagcatgctattcagccagcggctctttccgtttttgatccataaaccgaacggtatcagccatgacctcggtcacataaacttttacgccgtctgtcttttcatagcttctcgtctggattctgccgcttacaccgaccattgaccctttttggcagtacaatgccgtattttcagcgttttttctccagatggtgcagttgacgaagtcggttccggtttcacccgacgcgcttttaaagttgcggtttaccgccaacgtaatatgtgcgacgggaatgcccgctgctgtaaaacggagctccgggtctttcgtcagccggccgacaagcataacgtggttaaacaagccgtatcctcctctctttttcgaggctggcttcattgtagtacaagggctcgtgaaagcaaaaagcggaaaaagccgttatccgttcaggctgctcttatgttttcgtttttctttctgataaaaaaaacttttgtttttggccgcttatgtaatatgtatttttgagcagccgcgagaaaagtttcgttttgagccagtctttctcaaacatgcggacaaactttccgccgtcccatgcgaaccagtaaaaactcagctttttatcagtcagtgaaagctgaattttatactgttccatgcggtcttttgtttcatataaaaagacgacatttccccttctgttaagatgcacctcacaatcttcctttttgcataccaagtaggaatgatcgtcttttcgccttgaaccgtcttctatatagatttccttcaggcgcaattgattcataagcatctctccatgaccatattcttttacattataatgaaaaaatagaaatgattaaatgttgaccgcctacaaaaatgatgaagcatgtcttacagcattttcccgggaaaaatgatatgtgttataataaatgaacgaaacatggacaacaggggtgaaaataagagatgaaaacctttaaactggttgatctgaatgtggaacgtttagataaagacgatcagccgattgagcagtttccccttttagacggattgattatcaacaaagaggacggagaaaatcactggttaattgaagcactggtcccggccgaacacttttctttttttgacatgctgatgaaaagccagaaagaagcgaaggtgtttgtaacgattacgaaaaaaagcaaccgccccgcccagctgacaggaagcatcaaaaatatcgtcgagctggaaagaagtatacaagttttaatttacggtcaaatggtgtcaagaaaccaccccggatcagaaagcattctggagtcgctcgtgaaagaaggctactcgggcagccggctgattgaagcgtttaaacaaaaattatgatcatgaaaaaggccggacgttaatcatccagcctttttttatgccctagtcattgtgaggagcccgctgtttcagcagatctctgatttcagtcagcagttctgtctgctgatctgtttcctcggcttcttcagcctcttcttctgcttcttttttacgtctcagcttgcctattgtgcggatcacgataaaaatagaaaatgaaataatgaagaagttcacaatcgtttgaatgaagcttccgtacttgatatgagcatcgccgaatgtcacggccagccctgaaaagtcaagaccgccaagaagcaggccgacaagcggcatgatgatgtcttcaacgagcgacgtcacgattttgccgaaagcgccgccgatgacgacaccgattgccagatccatgatattgccccgcatcgcaaagcttttaaattctgaccacattacattcacccctttctatacaaaatgggcttttttataagcccatttgtttgcttttattctccgagcgcaaaagttaattcagcttcacacacgagctcgccgtcaactttggcaacgcctttgccgcgtccgatcgtaccgcgcgcgcgggtaatatcaacctcaagctccagcttgtcacccggttttacctgctttttgaaacggcagttatcaatccccgcaaaaaatgcgagtctgccccggttttcttctttaatcagcatcgcaaccgctccgacctgcgccaaagcctctacgattaatacgcccggcataacagggtattcaggaaaatggccgttgaaaaaatcttcattcgccgtcacatttttatatcccgccgcccgttttccttcttcgacttccgtaattctgtctaccagaagaaacggatagcgatggggaataatttctttaatttgctgagtatcaagcattctcttgacatctccttcatcgacaatagtatgtatagaaggcatatgtggcaaccaatctgtacatttggaagtatattatgaatcaatttctttttcaaccgcgctgtaaactgtaaccagctggcaatgagcctcgtccattaatgtgttatgataaataaagacttttaccctatgcaaagaggttggaagatgattgctaagtttactgaaaaacgtacgctggtgatgctgaatgagtggtatgacgccatgggaaaacgccaattcgatctagcccgttcccttcacgaacaaatcaatcagcatctccccaaattacaaaagaatgcaaagctcaaactcagatatcagctgtttttcgcacggtttcagctgctgtttgagaaaaaagacggtctgaataagctgttctgcgagctgaagcggcgcaaagatgagatggatcatgaattaacttattatttctattttttcaaagggttattccatatggtgaatggcgctccgaaccgtgctgtctgccgctttaaagaagctgaacagtacctgccggccattcaggaccgtttcgaagccgctgaattttattataaaacagcgggtgcatattacatgatgaagtcgcctgcgctctccattcaatatgtcaataaagcgctggaaatctatcaaggtgaattcggctacatcaaaaaaacgctcagctgccggctgcttctcgccgtgaattatatagacgaggcacgctatgacgacgcagaacagctcttcaatgaatccataaagataacggaccggatcaatgacaataacctgctgtgccacgcctattataattttggttttttaaagaccgcccagaaaaaagataaagaggccctccctttttacaaaaaggtattgggcaatcagcgtttcgagaaagagtctcccgtttcctaccttcattgtgtgtacgaagcggtcagagcactttttaaaaccggctctgccgccgaaggacaaaccgtgctgcagaaaggtttatacatatctgaaaaagtgcagaacaagattatgaaattgaagctgaccgcgctcaacatactgtacaccgctcaggaggacccgtacgaccgattgcagaagctcgtgctggagctgcagaaaattgaagcgtgggtggatttggaagtgctgcttcaggatattactgattactacaaaaaaaagggcgattttgagaaagccgcattttttatcatgcgcggctgatcaaaacgccccttcttttatctgactgagttgattaagcccagcatttggtctcccaatgtaatcgtgcggctgttcagctgataggaacgctgagacacgattaagccggtcatttcttttgacatatcgacatttgaactttcaagcgcgccctgctccatgccgattgcctgccggtttgcgccggtaagctcttcaatcgctgaagtccccgcgccgtttacggaaaacagattatccccttccgcatgaagcgcctgcggattattgacattgacgataccgagattaaacgtctgcgaacgggttcccgcctggtccgaagcagtcagcgttccggttttgctgattttcagctgagtcagcgaactgtcaatttgtatgggctgaccgttctcatcgagaatgggattgcctcccgctgtcatcagctgaagcagccggtcatttccgccggccggcttgagggaaagtgagccgtcccttgtatacacccgccgtccgtccgcttctgcctgaagatattgataaggtgatgtgaacgcgatatcaaggtcacggtcggtttttttgatgcttccctgccctgagtccagctgcggagtcatcaccgttccggcgccgagacgcaggccgggcggcgttttccgcatgttcggcgaattttcctttttatcatctatgtggtcatactgctgtctgatcagctcggaaaagcgggagtccctcgctttatagcctgtcgtatcactgtttgaaaggttgctgctgactgtatccatctgctgctgaagctgatgtaaggctgttgaagccgtcagcattgatctgagcatcataattgaatgtcccccattttgttacactttgccgatttcatttgcggctttatccatgcttttatcgtaagcctgaatgactttctgattggcttcaaatgatctgtatgcttccgtcatttctgtatacgtgctcgtcacgtccacgtttgaaagctccgagacgccttgctttaatgaatacgagacttggggattcgccgccgcgctcggcagttcagagccgtcggccgtgctgtataggtcattgccgtcccgtttcagattgcgcacgtcttcttccattctgatatcaatctgccccgccggccggccgtttgtcgtgaccgttccgttttctgatacggtgaatttttcattgtcgactgtaatcggctgtccgtttgttgataacacaaggtttccgtttatcgtaagctgattgttttcatttaatgagaaagtgctgctttttgaatagcggacgccgcctgcggtctgcacgggataaaacagctcggcgttttcattcgtttcggcattcttgggaacctgattctccataagcgcgatatccgtcggctgatcggtcgttttcaggcttccctgcgtaaacaacggtttcagctcctgcatgtatacgcctgtgttgacggagccgattttcgtttttttgtcgccttctattcggctcagaagcatctcgggaaaggcgcggattgaaccttgatcctctttgtaccctgacgtattcgcgtttgcgatgttatttgacagcatttccgttcttctctgctgtgtaatcattgcggacgttgcggtatataatccttttaacaagtcttccacctctgaaatagcattatttccagttgcctcaccggaacatttgttctataatgaaaatcagcattttttcttattatcggatttacattcccgttcgtgaagggtttgacagaaaaaaaccccattctttttcagaatgaggttttatcatcagctcagtttgcgttttggaagcttgtccatgttatccagcatgacgccggttccgaccgcaacacaatccatcgggttctcagcaacaagaacaggcaccctcagctcttcggcaagaagctggtcaagcccgttcaacagcgctccaccgccggtaatgataacgccgcggtcgatgatgtcagcggacaattcaggcggtgttctttcaagaacctgcttggcggcctgcacaatgacggcaactgattcacgaagggcttcttctacttctttgctgtttactgtaatcgttctcggcagaccggaaaccatgtcacggccgcggatggtgatttcttcatgacgtgcgtctgggaaaaccgttgcgaccttcaccttaatatcttcagcggtacgttcaccgatcagcagcttatactcgcgtttgatataatttaagatttccatgtcaaacttgtccccagccatcttaatagaagaggaggtgacaatatcgcccatagaaataactgcgatatctgtcgtaccgcctccgatgtcaacaaccatgttaccgctcggctggaagatttccatacccgcgccgatagcggcaacttttggttcttcttcaaggtacacatgctttccgccgcttttttcagctgcttctttaatcgctttttgctcaacggatgtaatattcgtcgggcagcagatcagcatgcgcggttttgagaaaagtccttttacattcagcttattaatgaaatgtttcagcatggcttctgttacttcgaagtctgcgattacgccgtctttcagcggacggatcgcaacaatattcccaggtgtacgtccaaccattcgtctggcttcttcaccgacagccagcactttgccgctgtttttatcaagtgccacaacggaaggctcattcagaacaattccttttccttttacatggatcagtacatttgcagtaccgaggtcaattccaatatcccttgcaaacatctatttatatcctccttgatatctgtttcacagtaaaatatccacattgtgccctaattatatatattatcataatttatcaaaaaaaagctgctgaacgatataagttcttgacaaaattttgcggatattcgcgaaaccgcccgggaggagaaaaaagggcccggcagacgtcaggcgctacggctgctgaacgggctccccttcaagaatttcatccttcttgtactttaatttcgtcgcctctccccctcttaaatgtctgatggatttatgataatcgagtatttcttttacttcattcgccaagtcaggattgatttcaggcaggcgctctgtcagatctttgtgtacggtacttttggaaacaccaaactctttcgcaatgacacgaacggtttttttcgtctccacgatatacttaccaatcttgattgttcgctctttgatgtaatcgtgcacaccactcgacctccccagttggatgtgagaagtgtgaaatgagatccgtattctgtaacagattcactgatgatgcagcttcttcgttgtccgattatataagaaggttttagaaatatgcccacgatccctcacctcaaacactctctttgataggtttgtaacagtgtattagcaatgaattgggaatatgctaaaaactcaataaggacaaggggcgggtcataattttctgctttttgatcggggggtttacatccgcgcgatcctgctgtagaatgaaacagcacaattagttacttaggtaagttttttgaaaaggagaacggaaatgatccacgtcaacagacgcctcattcaccaaatcaatcaatgcgcccgcctgattacgaagaaagccaatgaacggctggaaccattcggcctgtactcctctcaatggtcaatcctatattgcttaaaaacgatcggaccgatgacccaaaaagaaatctggtcctatctgaacgtagaggcgccgaccgttaccagaacgatcaaacgccttgaagaaaacggctggattcagcgggaacagggagaagacaagcgggaaaagctcgtcgtcctgacgaaggaagctgaattgaaatacgacagcatcaatcaagagatgctgaagttcgaggaagacatgcttgcggatttccaagatggagataaggaagctttttctgagtttctgaatgtgtttttaacgaaatagaaaagaaagggaagtgctgtacttttgagtaaatctgactcgatctggaccaaagattttattatggtcgtactcgtgaatttatttgtctttgtgttcttttatacatttttggccgtgctgcctatctatatgattcaggagcttggcggcagtgaatcgcaaggagggcttttgatcagcctgttcctgttatctgctattattacccgtcctttttcaggggcgattattgaacggttcggcaagaaaagaatgacgattgtatccttggcgctgttcgccctgtcttcttatctgtatttgccgctacacaatttctatctgctgctcggactgcgttttttccaaggcatctggttcagcattttaacgacggtcacaggcgcaattgccgctgacattattcccgccaagcggcgcggcgaggggctcggttatttcgcgatgtctatgaaccttgccatggcgatcggtccttttctcgggctgagtcttgtgaaagtcatttcgttcccggttttctttacgatttttgccgtatttgtttctttaggcttgctgattgcttttatgattcgtgtgccggatcaaaacaacagcggaacgactgtcttccgtttttctttctccgacatgtttgaaaaaggcgcgcttaaaatcgcgattgtcgggttgtccatttctttctgttattcaagtgtgacttcatatttatccgtttatgcaaagacgatccacctgttggatgtcagcggctatttcttcgtctgtttcgcagtgacgatgatggccgcccgtcctttcacaggaaagctgtttgacagagtggggccgggaatcgtcatctatccgtcgattatcgtgttctccgcggggctttgcatgctggcgatgacaaacagcgccctcatgcttctcttgtccggtgccgtaatcggtctcggatacggctctatcgtaccgtgtatgcagacgctggcgattcagaactcgcccggacaccgttcaggctttgcgacggctaccttcttcactttctttgacagcgggattgccggcgggtcatatgtattcggcctcttcgtcgcttcggccggattccattcgatttatctggcagcggggctgttcgtcctgattgctttactcctgtatggctggagccagaaaaaaagaacgccgcttcaagcggacggaaacgtttcaatcgcagaatgatatgacaaaaagccggggggcagcccccggctttttttattcggccgctctttcccgcgcgattcgtcttgccgcttttacataaggaggatgaatatacataagcgccgtataaccgagacatgacaaaatgacacccgcaaaccaggagatatcatagatgccggcgaacgccgggacgtacatcccgattaaagaaataaacgcgccgagaaaggtcgcggcaaaggcccggtaattatagcctttgtaataagtgtactgtccggtttccgaataaaggtcttcaactgagagctgcctttttctgatgataaaataatcagccatcatcaccccggccaccggtccgagcatcccgccgatgagcccgagaaacgcataaacattcgtggcgctctccatcagcttccacggtattgtgaacagggccaaaacggcggccagataccctcccctcctgaatgtaatatatttcggcaggacattcgccaagtcataggccggtgacacgatgtttgccgccacgttaaccgagacggcggcgatgcaaagtgtgatgaccgaaagagcgataacgaaaggattatcaaaccgggccaaaatctccaccacatcccaaatcggttctccgaatgctacttgtgatccggatgtcaccgtgatgcttgcaaacgcgaacagcgcaaacgttcccggcagcccgtaaaactggccgcgaatctgttctttttgcgacgcggcgaaccgggtgaagtcagggatattcagaatcagcgtcgcccatattccgataatgcccgtcactccggcggcaaacggccaaaacgtttcagaaaaggtgtggaactttcccggctgtgagtaaatcggtccgagcccgccggcaatatctatcgcccaccagaccatgccgccgaagacgagataaacaagcggacccgcccacacttcaaattttttgattgattccatgccgtgccgcagcacaagcagatgaatgccccaaaagaaaatgaacgacagaaagcccggcagatgaagccccaatatattccaatctccgccgaggctcccccagcccggccatatgttcaaaagcagaatgtgtaaagccgtgctcccggcaaatgtttgaattccgagccacataatggctgtaaacgccctgagaagcgccggaatgttagcgccgtatattccgtaagaagccctgataatgaccggaaaaggcaggccgtatttcgttccggcatgaccgttcaaggccaaagcggcgaacaaaatcagtgacgccgtcacgataatggcgagcacctgccacggagaaaggccgatcgcaatgagcccgcccacagtcgcataggtcgggatattatgaatacagcccatccaaatggatgcaaaattcaccgctttccatgtccgttcgccgtcttctaaaggcagtaaatctttgttgcttagccgatcactcgttgtttttttcattttctccctcccgcatgtacgttttccttacatcacatgtgaaaaaatataactgaaaattccgtaaataacattggtcgctgtcgacaataatcgttttgatttttgagcacattacacaaaaaaagagacggggagagcccgtctctttttgttgcgcctgttaagaggcttttttgaggagaaccgaaaaccggaacgccatcaaaaggcttacggcgccgacaacgataagaatcgtgccgagcatatgaaaatggccggcggtaatttcttttccgaaaagaatgcccaaaatgacagaagacaaaatcgaaccgagataccggcaggtctgaaacaggccggacgttgttccgaccatgtcggcgggactcgttttcagcatggccgcctgaaacgtgacatttccgaagccgtagccgacacccagcacggacaggatcagcccttttcctatcatgggcgcctgaagaaagaaaaacgttaacagcaccgccccgatcacggtcaggcaggttccggcaacaatcggctgaagaagccctttcttatctatccattttccggtcaaaggcgacaccagaatactcatgcccgacataaacagcataatcaatccgcttgtctgaacggacaaatgcatttcatcctgaaaatagctcggaagcccgaaaaagatgcagtaaaagaatatattcagcaaaataaattgaatatacaccgacgatagtttccgatgcgttttaaacagcctgacatcaataaacggcttctccgttttcagctcgcgccagataaacagcccgacaaacaaaagcccgaatacgccttctgtatagtgaggcttcgtactgaaggacaataaaaacgacaggagaaggataatcgctccggcaaacagaagtatcccgatcgtatcaagctggcggagcacgcctttcaagccgccgatctcgcgtttttcatctttcggaaacatatacattccgagaaaaaagctgagaatgataaacggcagattgacaaaaaagattgccggccaccctccccaaacgatcagaaaaccgccgagagtcggaccgagcgccgtcatggctgatgcaaagattgacaggacggccagcgccgaagcctgcttctcccgtatatttgaacggatcaatccgacgccggacggatatatcgcgctgcttccgatcgattgaaaaagccgcatgatcagcaaagtcataaaagtcggcgcaaacggcgcgccgaccgccgagacagcaacaagcagaagcccgatcaaaaacagcttcttcctgccgagcatatcaccgagcttcccggtaacaggctgcgccaccgcgctggccagataaaaggacgatatcagccaggacaccgttgtaaacgacaggtgaaattcatgctgaatactgtgaagcgcaagagaaatcatcgacgagttcaatgggttcagcatcgtccccgaagccacggctgtcaagaacaggacgcggctttttttggagattgtcattttgtctgtgtgataaattcttccgtcgtccggcttctgccgattttcgggaagataaacttgagtgtcgcttcgtgctgttcatcgctgaatgtcgccatcgcgtcagttacgaaaacttgctgatacccgagctgaaaagcttctcgcgccgtgctttccacaccgatgtttgtcgcaatcccgcataacacaatcgtgtcgatcccccgtcttctgagctgaaggtccaggtccgtgccgaaaaacgcgccccactgccgttttgttaccgtataatcattttctttcactccgatgtcaggcacaaattcagcccagtccgccggcggagccgaatggcccgccgcctcttcatccgtcagcggcttcagcgcatccgctccgtcatgaaaatccacgttcacaaagctgataaatccgcctttttcccggaacacatcaattaattttttcgcgttcggcacaacggtaccgcttttatccatcggcacaatgcctttttgtaaatcaataaggaccaaagccgttttttcaaattgcagatttaatgatgttgtcataatgattcctcctgatgcagttagtgtttctcaccccgtttattttactctttcccggacaggatttcttccgccgtgctccggcgctctttttatggatataaagtcgcacggcacccatttgaaaaagcagcattatgaacgcaaaaaaccatgtcagataaccttacatgaaaatgttttatcgttcttttttctctataataatgaattaatcacaattacattctgaatgagacggaggaatacaacatgcagatgggcgatacagtatttatgttcttttgcgctttactcgtgtggctgatgacccccgggctggctttgttttacgggggaatggtaaaaagcaaaaacgtgctcagcacggcgatgcatagtttttcttctctcgccatcgtatccgtcgtttgggttttgtacggatattcacttgcttttgcccccgggaatacatggcttggcgggattgaatgggcggggctgaagggggtcggctttgaacccggaagttatagtgatacgatcccgcattccttgttcatgatgttccaaatgacgtttgccgtactgacgacggccattatttccggagcatttgctgaacgcatgagattcagtgcttttcttgtattttcctttttgtgggcttccctcgtatatacgcccgttgcgcactgggtatggggcggcggctggatcggccaaatgggcgctcttgacttcgcaggcggaaacgtcgtccacatttcttccggggtcgccgggctcgtgctggcgattgtgctcgggaaacgcaaggacggcacggcggcttcccctcacaacttaatttacacgttcttgggcggagcgctcatctggttcggatggttcggcttcaatgtcggcagcgccctcacgcttgacagtatcgcgatgtttgccttcattaacacaaacaccgcggctgcagccggaattatcggctggattttaatcgaatggatgctgaataaaaaaccgaccatgctgggtgctgtatcaggcgcaatcgccgggcttgtcgccattacgccggctgccgggttcgttacgccattctcttccatcgtaatcggtttcatcggcgggcttgtctgcttttggggcgtttattggctcaaaaagactttcggttatgatgatgcgcttgacgctttcggcctgcatgggatcggcgggacatggggcggcatcgcgaccggtttattcgcaaccacttccgtcaatgacggcggggcaaacgggctgttttacggcgatccgggactgctctggaagcagattgcggccattgcggcaacctatgtatttgtatttattgtcactttcgttatcattaaaattgtaggtctgttcattcccctgcgcgccagtgaagaagaagagtcacttgggcttgatttaacgatgcacggggaaaaagcatatcaggacttataaagtgaggagtggcttagatgagcggtcaaatgttcaaggtagaaatcgttacgcgtccggctaagtttgaaacattgaaacaggaactcggtaaaatcggagtcacatcgctgaccttctccaacgtacacggctgcggccttcaaaaagcccacaccgaactgtaccgcggagtcaaaattgagagcaatgtgtatgaacggctgaaagtggaaatcgttgtcagcaaggtccccgttgatcaagtcgtggaaacggcgaagaaagtgctgaaaacgggagagcccggagacggcaaaatattcgtctatgaaatcggaaacacgattaatatccgcaccggagaagaaggaccaggagctttataaacaggcagaacgcccggagacagaaatgtcccgggcgtttttttcgggcttcattaaaaagaagaaacctttttttcatgcgggacaggccgcttatgccgtacgggttgttttttcgcatatgtactgatattgaccagtatgccgcacaaaaacagcgtcataatcaatgaagaaccgccgtagctgataaacggaagcggcacacccgtaaccgggagaagtccgctcatcgctcccaaattcaatacaacctgaaacattaattgaaacgtaattccgatggcaagaagcttcccgaacgggtcatcagcccgcacggccgtttttacgccgagaagcattaacgcaaaatataatcccaaaacgatcagaacaccgaatatccccagctcttcgctgatcacggccataatgaaatcggtatgcgcctcaggcagatagttcattttttcaacactgtttccaagccctcttccgaaaaacccgcctccggaaatagcaaaataggattgaatcagctgatagccgtccccattcgcgtcaccaaacggattggtaaaggaaacgaggcgcttcacacgataggaagcggaaaatgcgagataaacaacccccgacaccgccgtcgcgccgagcacgaacagatggcgctttttcaagccggcacataataaaatcgacccgcacgccgccaggattaaggaagccgtccctaaatcaggctccgccaatgtcagcagaaaagcagttcccaaaatcactaaaggcggcagaacccctttcacaaattgatgaatgtacggctgctttttcgtataaatcgaagcgaaatacaaaatcatggcgatcttcgccaattcagacggctgtacgacaagcgggcccgctcccagccacctgcgggaaaaattccgctccagcccgattcccggtatcaagacgagcagcagcaataccagcgaaccgaccacaaacagcggtacaagccgcgcataccgcttatacggaagacaggcggcaaatagaaataagcataatccgatcagtaaagaggcactctgcttatggaagaaataggatggatctccgtaccgctgagaccccatcacatcactggcgctgtacaccattaacaagccgaatccgcaaagcagcataatgacaaacacaagcggcagatcggcgtttttcaaacgtttcagcaacggacaaaactccttcggctattcttttcccgcatacttgacgcacattaatacagtcacgtttcattctgtttacttttttatgattatttttaataccaattgtgtctcatagaaaaaagcattacactgttcatataaaataaagataaaaggtgatatttgtgaattacgaactatttaaagcgatcaatggtttgtcgcaccatagcgccattctcgactctatcatggtatttattacggaatacgccatttacgcctacgcccttttcctgcttgccatgtggctgttcggaagcacaaaaggcagacaaaacgccctgtacgcgggcttcacgggtgttgcagcgcttatcgtcaactacctcatcacgaaagtctatgtcgagccgcgcccctttgtcgaacatacggttcatacgctgatccctcatgccgcggatgcttcatttccgagtgaccatacgacaggcgctttggcgatttcaattgcgattctgttccgcaacaaaaaactcggctggccgcttgtgattttcggccttttgaccggcttctcaagaatttgggtcggccaccattatccgatcgatgtgctcggaagcattatcgtttccctcattgtcggattcctgctgttcagattttcaaatgtgcttcgtccgattgtcgatctgatcgtgcgaatctatgaaagtatcgttcataaaagcaaatcgacaaaccataatatataaaaaaagccggcgtctgtcacagactgccggtttttgtatgtttggctgtatgctttttcctttgtaaagcacagaatgcggcaatgccgagactgtcaatcagcacatcgcggagacatccgtttctgccgaaaaagagctggacgatttctgtcaggaaagcggcggccaatgcatacagcaccgccctcttcatgcgcctgcgctccctgaaaaacaaataggcgagcacaaaaaatgaaaacgcgtgcccgagcttttgaatcgccgcttccggtatggcgagctccgccatatcgaacacaaagaaaccggacacatccggatgcggcgtgaaacggaaggacaccgtctgcgacacaatcatatcgtgaaagctttccgtcaaagcagaaacgaaaacaaagacgagccacccggccgccagacatttattcattcagcatctccttcgttttctactagtataaaggcacatgcggcaatatgaaaagcgcctatctgagctgataggcgctttgggatcaagattacttgcccgaatctttcattgagccgtcatctttaccatctgtcttgtcttttgtgccgtcctctttgtcacctggtttttcttcggtttcttttttaggcgtcacatcttttttctcggaagactgctgaattgacccttccgtttcttctgtcacagcgtttttctcttcagccgccgctttttcaatagatgttaccggcttgtccataaaattgagcgggttcatcgctacgccgtccttgcggatttcaaagtgcacgtgatttccgctttcttcactgtaaaggttttttccggatttaccgatgacctggttctgctttactttgtcgccctgatccacgctgacttcagataaagactgatagacagtagacaggccgtctgagtgttcaatttcaaccacatatcccagtaccgggtctttagcagctttaacaaccgtaccgctcagagaagcagaaacatcaaatgattttccgtctttctcagctaagtcaattcctttactgaggctgtacgtgttattatagttaacaagtgctgcttctttctctttttttgcggcatcagtttcataaaactttttcacaacagaaacattttcagaatgagcagccggcattgcgacgttttccattgacttgcctacttcgacggcatcgtctttgccgctgtcatacgcggagtttccgccgttgttcgtcagattgtccttcacatcattcgaaacggattgataccaaaggacagctgttaaaatgacggccgcactgactaagtagattgcagggaatatccagcgtttgcgaaaaaaccgctgaagttttttgacttgagaagttttcttttcttcctctctcatttgttcatcacctcagcaacattctgaacacttttctgaaaatatatacacatccataaaaaacttttttggaaatagtatgtgcagattgcacttgattatgtaatgaaatgtgaagggagatcccggaatatgaatttgaccctgcgcaaagccgtattggaggatttagatgcggtggtggccatatacaactcgacgattgcctcacggatggtaacggctgatacggaagaagtgacgcccgaagaccggatggattggtttttgcggcacacggaccggcgcccgctgatggtcgcggaagatgagaccggcaaagtggcggcctggatcagctttgaaacgttttacggccgtccggcctatgacaaaacggcggagatcagcatctatctgcatcaggattgccgcggcaaaggagcaggaagctttttgctgaaagaagccctggcactcgctccggcaatcggcatccgcagcctgatggcttttatcttcggacataatgtgccgagcattaagctgtttgaaaaattcggttttaccgaatggggcgtattcccgggtatcgccgaaatggacggaaaacgatatgacttgaacattttagggagagaactgtcatgatcaccatcgataaagagaaagacgaaaaccagccgctcaataaaaaagcccgttcccttgccgacatcgccaaatggggaaagatcaccgccgtgtttctgatcatcacgggctctctttccgctctgtcagccattgtgacactgctcggagccattccgggggttctgctcatcatttccggcgtcatgctgatgcgctcggcaaaagcggctgccgcccttcaggaaggactagaagaaaacgcggaagaaaatatgcttgcacattacgcgtcatttatcaaaatgcagtttttttacgcggcatccagtgtggtattgggcattctcgcttttattttagtcgtcatcttcgctgtcatcggaattatcgcttatcacagcactgatacgtatgacacgcctgattcatattactatgagaacgacccggtgtttgaatgacaaaaagagctgatcgcgcgtcagctcttttttaataaagcatttcttttttccggtcttcttccgttaaaaattcaataaagctcttcatcgcagacggctcctcggcaatcagccgggtataggcgcttttccgttcctcggacagaatgtcgctttttctgattctgttcagcatataaaggcggatcgttttttgcacctgtttccgctgatggccggcttccttaaaaaacgcaagacccagagccgcaaggagggcaaaaatgccggccgatacgagagctcctctcccggaaggggcctgaatcaaaagcgatgccagatgaaacagactaaaagcggcgagcgggaaagcaagaaaacggtaaatgatgctttttttcatcagcggcgcgatggcgatttgtattttctgaatttctttttttatgaatcccggcaattgttccgcatgctccagcttcatgccctctcccctttgctgtcatttttgtcttctttttcatatatgcatattttaccgcactcggaactttctttgaaagaaaactgcattcatctttgattccggctctttattctttcaaaatgtcaatgttataatttgaaatgggaatcagattgctgcacttgtcggaatactaatgggcacagtcttgataaatatgatatagcggggttgcaaagtgagcatttcatttattttattcggattttttttcgttttaaatatacttttggccgtcatcatgattttcaaagaaagacgcgatgccagcgcttcatgggcttggctcttggttcttttttttattcccattttagggtttattttatacctgttattcggccataacctgagacgcaagcatctgtttcagtgggaagaccgtaaaaaaatcgggatagaaaagctgctgaagtttcagctgaaagatctgaagtcgaggcaattccaatttaacaacagggcgactgtggataataaagacctcatctatatgcttgtcatgaacaaccacgcagtctttacagaggataattcggtggagatattgacggacgggcgcgataagttcaaacgcttaatgaaggacatttccaacgcaaaagatcacattcaccttcaatactatatttataaaggtgatgaactgggaaaaaaattgcgcgatgccttagtgaaaaaagcacgcgaaggcgtaaaagtcagagtgttatatgatgaactcggttcaagatcactcagaaaaaaattcttcaaaccgctgcgggacgccggcggccatgtggaagtcttttttccttccaggcttcgtccgattaatttgcggctcaattatcggaatcaccgcaagctcgtcatcattgacggcgaaaccggctatgtcggcggctttaacgtcggagatgaatatctcggcctgaatccgaaattcggctactggcgcgatacgcacctcaggcttcaaggcacggcggtacacgccattcagacacggtttatcctcgattggaaccaagcctcccatcatcatacgctcacatacgttccgaatcattttccggaatgcgagccgaagggcaatgtcgggatgcagattgtcacgagcggaccggactcagaatgggaacaaattaaaaacggctatatcaagatgatctcaacggccaaacggtcaatcctgattcagacgccttactttattcctgactcaagtcttttagatgccctcaggatcgcctgtctgtcaggcatcgacgtcaaaatcatgattccgaacaagccggatcacgctttcgtttactgggcgactttatcttacatcggcgatcttttgaaagccggagcctcagtctacatttacgataacggctttattcatgcaaaaacgattgtcgtcgatgatgagacggcttcagtcggtacggcgaatatcgacgtcagaagcttcagacttaattttgaagtcaacgcctttatttatgacgtcaccattgcgaaaaaactcatttcctcatttaaagaagatctgctcgtctccagaaaatatacgtatgaagaatatcaggagcgttcgctgcggatccgcattaaagaatcgatttcaagacttctttcgccgattttgtaattcccggggtgttttctcgggaattttctgatataaaaacggacacggcatgaaaaaacacattttatattcaaaagaatgaccgaatagtgtataaatgaaaagtgagtatttttttgtaaaggagtgccatagtttgaaacctgaatcagtgaatcgttcgcttatttctatttcgaaatggggaaaagcgacaggtattttatttattatcgtgggtgcgtttgcggcgctgtcgggcgcgtttttctttttaatcggagccattcccggcgttctgcagatcattgccggcatttttctgatgcgctcggcaaatgaagcgggacagatggcggagcagttcaatgaactgacagaggaacatatgctggagaattatgcaaagttcgtgaaaatgcaggggatctacctgattgtgacggtcggcttgtccgttctcggtatcgttctcttcattgtcctcatgacgctcggcatcgtggacggcgtgtttaataatattgatgccaatacatattaaaaaggaaaattccggcgcatccgcccgggattttttcttattccgcttcttcgataacgggaaagtttttctgttttggattttccaatacgacgatggcataatggcgcagctgatgcagctgatgcagctgatgcagctgtctgcaaatattctttcagacattccggcttcagctcaaaaaagtttattcaaataaagcttttcctcagagtttcaactgaaatcactcaattgttcgactgttcctgatcaggtttagaagcaagaattgtgattctgcaaaataaggataaaggccctgatggaacaagaccacttatcatacagttttttgggtctttgtaattaaattacaattgttcttaatattcactcatgtattcatgctattatattgaaaggaacgatcaaaagcgttggcgttcgttaaatatttacgagtgctgcctcatgtcaaagtcagaaaaaatagtataggaggtaacatatgtttaagtttaaaaagaaattcttagttggattaacggcagctttcatgagtatcagcatgttttcggcaaccgcctctgcagctggtacagattactggcaaaattggactgatgggggcggaacagtaaacgcagtcaatggatctggcgggaattacagtgttaattggtctaataccggaaatttcgttgttggtaaaggctggactacaggctcgccatttagaacaataaactataatgccggagtctgggcgccgaatggcaatggatatttgactttatatggctggacgagagcacctctcatcgaatattatgtagtggattcatggggtacttacagacctaccggaacgtataaaggtactgtaaacagtgatggaggtacatatgacatatatacaacgacacgttataatgcaccttccattgatggcgataacactacttttacgcagtactggagtgttcgccagtcgaagagaccgaccggaagcaacgctgcaatcactttcagcaatcatgttaacgcatggaagagccatggaatgaatctgggcagtaattgggcttatcaagtcttagcgacagaaggatataaaagcagcggaagttctaatgtaacagtgtggtaacagctcatctttaattaggggcagctaacgggctgctgatcgttcctagagaaattttacaatgattgttaagaggcgaacggttttggcattgctggaggcagggtatcattttttgtttaactagctcacagctgacaccttcacataagtcttaagcaaaatataaatatcccggtaaccacctcctttagtttcgaaggatttcttcattaaacagatcgcaatccgcatccaggcttgtctgaatatggatccaaaaccgtgatttcctcattataacttgtaaccatttttgttacacctatagcggcatgaacccatctctttttaacaaaagagatgattcattacatcataaagggacttgctcgcaagttcattctccattgcccgctgtacgcttccgaacgtctcatcgagcgcgcgctgaatatttttgccgaccggacagtcggggttcggattgtcgtgaaccgcaaaaagctcttccttattctgcaccgccctgtaaacctctaagagggtgatctccgacggatcttttttcaggctggctcccggaacacccgctcgggatgtcagaatacccgcttttttcagctggctgatcgttctccgcacgacgacgggattggtgtttacgctgcccgcaatcatatccgatgacgcccgttcatccgttgagatcagcgatagaatgtgaatggccacagcaagacggctgttaatcatgtttttcaccaccgttgtaaccgcaatagttacatttcatttgtttgtcaactactaatatacactaaaacgggcggcaggatgaaatcaagttggcaatagaggtgtaaacaggccggcgggaaaccggccgaagagggattaaaataagaaataacgctgtccgagcggaacatagctgacgggctggcatgccagctcttctccgtcggcgaacacctgataggttttcggatcgacttgtatattcggcatcgcgtcattcagcttcatgtcgagcttactcagcttacggatattccgtacgggagaaatcattttttcaaggccgagcttttccggcacaccgtttgcgataccggcctgggacataaatgtaatagaggtatttcggtttgctttaccgtatgatgcgtacatctgccgcataaacacgggctcaggcgtcggaatggaagcattcggatctcccatctgggcgcgggcgatcatgccgcctttgagcacaagttcaggtttgacgccgaagaaaaccgggtcccatagtacaaggtcggcgagctttcctttttcaacggaaccgacttcatggctcaggccgtgagtgacggccgggttgatcgtgtatttggcgatatagcgtttggcgcgcacattgtcattgccgttttctcctgatagagcgccgcgctgttttttcattttatcggccacctgccatgtccggataatcacttctcccaccctgcccatcgcctgcgagtcagatgacgtcatgctgatcgcgccgatatcgtgcagaatatcctccgccgcaatggtggccgctctgatgcgtgaatgactgaacgccacgtcttcaggcacttttgaatctaaatgatggcagaccatcatcatatcaagatgctcgtccatcgtgttgacggtatacgggatcgtcggcgtcgtagaggacggcaggatattggcgtaagatgcgagtttcataatatccggtgcgtggcctccgccggctccctctatgtgatatgtatggataacccggtcgccgatcgcatcaagcgtattttctaaaaagcccgcttcatttatcgtgtctgtatggattgccacctgaatgtccgcctcatccgccgcttccatgcaagctttaatggcgcttggcgttgatccccaatcttcatgcagcttcaggccgatcgcgcctgcttccacctgctcgatcagcggcgctttatcggatgcattcccttttcctaagaaaccgacattgatcggaaactcctcggccgcttccagcattctcgacatgtaccatgcaccggatgtacaagtcgtcgctttacttcccgtcgcaggacccgttccgccgccgagaagcgtggtcacgcctgaagaaagcgcgacttccatctgctgcgggcagataaagtggatatgcgtatccaccccgccggccgttacgattttcccttcgccggaaatgacttctgttccggcaccgataatcatgtgcgggtccaccccatccataatatcaggattgccgctttttccgacgccgacaatccggccgtccttcaccccgatatccgccttgacgattccggtataatccaggataacggcgtttgtaatgaccagatcaagcgctccgtctttcccggtgatacgcccgttctgccccatgccgtcccggattgttttccctccgccgaaaatcatttcttcaccgtaattcgtgaaatctttttcgacttcaatccataaatccgtatctccgagtctgactttgtctcccgttgtcggtccgaacagttctgcgtattgctcacgtgacattttcatcggatcgcctcctccatccatccggcttttttaagatttgacagagtcttctcttttccccgctcatccatatacgtatcggccatgccgttgagacctctgaccgtttttcgccctccgatttccacgagcgtgacggttttctcttctcccggttcaaaacggacagatgtgcctgacgggatatcaaggcgcatgccgattgctttgtcccgattgaaggaaagggcgccgttggcttcggcaaaatgaaaatgcgatcctacctgcactgaccgtgttccgttattggtgactgacacctccagcgtcttccggccttcgttaatggtgatgatcccctttgcgacttgaatcgctcccggcttcatgacttcacctccgccttgatcggctgatgaacggtgacaagcttaaccccgtccgggaacgtcgcttccacctgaatgctgtccagcatttccggaacgccttccataacgtctttttccgtcaatacattgcggccggattccatcagctcagcaacgctttttccgtctctcgcgccttccatcagataacaggtcaaatatgcggcggcttcgggataattcagcagaacgccgcgcgccttccgctgcttagcgagctctcccgccgtaaaaataagcaatttttcttgttcaaccggtgtcagtttcatctgtattcccccttagtgatagtcaaacacaatccgcatggtcataccaaaacgatgcaggcggccgtcacccccttcacctcatgaaatgttaagtgataaaagttattcgacggtgaacggcctgattccttttgcagaaattaccaatttctcatttttttcttcaacaaacgtttaatcaaatgtgaagaaaggttacattctatgtgaatattataaagaaattgccggggaatttatagaatatttaaaaatttagtgaatattaaccaaatgaactggaatttttgtcatttctcataacaaaaagcccaaaatattttgggcttttgctgtgtttcactatccaaattaatcatcactgagtttatctttcgttttgccgacacccttttgcaggctgcctttcgctttgtcttttttaccttccgcttttaagtcggacttgtttgccatgtcgcctgctttgtcctttgcttcccctttcattttgttcatgccgccttttactttgtcttttaaaccgttatcttgactcatgatctcttcagctccttttttgttctgtgtacttgttttcttccctttcagcctgatagcaaacatgtaaactctcaattattgatttcacagcgttccccgtagcggagcactttgtaaacagccaatccgtctgacagcttattatccccgtattgcaccggcagaagggcaaagaaaacataataagttgaaaaatagacaaattggtaaaaaaataagtttggctcgaggacatcttttatgatcagcagatttattaaaaagatagaagcgagattaaacagacagcctccggaatagacgagcgcgctcgtcagacggttatctatccgcaattcgccgaacttgcagaaagaatctatgaagtagatacgccgaacctgaatcggccctacttttaaaagacgtttccccattccgatatccaatgatgccttgcctccgaacagcatggccataaagctgtgtcccgacacatgaatgacagacaccatcggcagaatgatgagaaatgatacgaaaaactttatcatatcattgaatccgaacaacaaatccctccttcccatcatacttttttctctcttttgcgatttttccgtttttttctatggtcaaacgttatgatgtgcataaaaaaataaccatctgctgatcagatggttaagaaaattatatatcgtataaacactgttctttttgaatgttttctctcatgcgaatcgctttttcataaaaatacgccgcttctttatattgctcatgtgcgcttgtgtaaacggcggcctccaaggcgaaatcttcaatatacacatacagcgatttttcattcatatagtcaaacacttcatggattaaatccatattgagtgactccaaataaagcgcttgtaaaaacttatacttctctaaactgaatcgatcgccccgttctttcgcgatcatgacccctctttcataataggtaagggccgcttggtcatcatgcagcctgaaaagggtgtgcgttaagctgaacagcgccttcggaagctgttcaagctgatgctcttcaaaaacgggaaccgcttttctaaagtaccgggccgcttcatccagatctcgcttttcagaataacaattccccagattgtaaagcgaagacccgatcaggcggggctgtccttcaagcaaagaaaggcggagggcttcgtctaaatgctcaagcgctttgtcgtagtttttgcagtcgatgtagtttcctgagatgacgaaatggcattgaattctccgcactctgtagaaatcgtgtttcatatacgtatccagcgcctgaatcccgtgattcatggaaaaatgagtctgcttcatgacataaaacacttcagacatcttgaaatggaattccgccctctctatatcatcctcgacaaatgaaaggagtttttccgctttccggtaaaaagaaatagccgcaacatagttattgtgatcgaattcatacatccctctgaacaaatggaaataatactcagacagtcccgatatgctgtccgtgctttcgatcgtcttttgcagctcgctgtactgaatctgtgattgttcggtgcattccggcttgacgtaatcaagcataatatgatggcggtagctgatcagctgataatataacagcagcagctggtcttcctccatacgttgtatatcctcatcaatttcctctttcagctttatggcatcagccgcttgaaacgctaaaatgtgcttgtaccatttgttgatcttgactccaacttgagatgacggaatctcgtatgcggtcatgcccctttcacaaccttttctaatttctattggttatattttaacatattgtatggctttggaattgcataacttgattgtcctgcatcaaaattcctatcatatatttcggctgtcatcggtattttttgaacagaccgctctcatattgtgaataaaaaagcctgcccttgtccgggcaagcttttcttcatccgcctatataagacatttccactttctttttcccatccgttttagaaagcgcgcggtcaattgaatactgatccgtgcgatttctccagacagaagcgatggattccgtcaattcatcatcggtcagaccgccgcgcacgagtttccgaacatcatagccgcttgacgcaaacaggcacgtaaacagctctcctctcgccgacaggcgcgctctgttgcaggaggcgcagaatgcatccgagacggaggaaatcacgccgatttcgccggaaccgtcaagatagcggaacctggaagcgacctctcctttataattcgcttctatcggctccgtcggcatgtgctggttgatcagatcaataatctctgccttcgtgatcacgtcttttttattccattgattcgtattgcctacatccataaattcaataaaccggagaatatgacccttttctttaaaatagcgggccatcggcaggatatctttttcattgacgcccttttgaacaaccatattgattttcacaccgagtccggccgcttttgccgcctcaatgccctcaagcaccttgttcaccgaaaccccgcggccgttaatggccttaaaccgctcatcctctaaagaatcgaggctgactgtcacgcgatgcagccccgcctgcttcagtttttccgcatacacgggaagcagagagccgtttgtcgtcatcgcgatatctttaagtccggggatgcgcgcaagttttttgatcaattcaggcatatcttttctcatgagcggctctccgcccgtcagcctgattttttcaacgccgaagcggccgacaaacagcttcgcaagccgctcaagctcctcgaaggagagcaattccgtcttttgtaaaaatggataatccggtccgaataattcggctggcatacagtacgtgcatctgaagttgcagcggtcggttacagagatacgaagatccctgagcggcctttcccttttgtctgtcacccggcgcgtttctgtattcataagcccaagacccctttctattgttcaacccgttcaggatgtgtgtatacgttaaatgatccgtttctgacaaaacctatcgcggttatgttcagctcttccgccatttgcagcgcgagctccgtcggcgccgattttgaaatgacaatcgacacgccgatttttgcggcttttaataaaacctctgaggaaatccggccgctgaagacgatcagcttgtcacggaccggcattccgtttttcaaacagcagccgtacagcttatccagcgcgttgtggcgcccgatgtccgtcctcatgaagagcagcttttccgtatcgcacagcgccgcattatggacgccgcccgtttcctggaaggtgccgcttcctctttgcatctccttcatcaggcgaaggcacgtctcaggagttatagtgatacggctgacggcggttttggccgttttcacatcctgctgaaagtaaaaatggcggcctttcccgcagcatgaaccgatgaccctcttcgtatagtctttttgctcaagcactccgggattcgtcagttcaacatatgcaaacccgagactttcatctatagtaaagcttttgatttctttttcaaaacgaatgacgccttctgatgcgagaaatccgatgacgagttcctctaaatggtcaggcgtgcagacgagcgtaacaaattcctgtccgttcaccatgacggtcagcggatactctgaaaccatccgatctgccgtctttgttaatacccctttttcatagcggtatatgtctctaaccgctgttgttttttcatccactgttttcccctccgcagtatccttctcttttattcttccacaatccctgtattttgtcgaatttgcggtttaaaaaaagagccctcttaggactctatgtttcattgcgatgatgtctgctcagaatggtgaataaaataactgcggcgataatggccaatatactgacgaatatgaaggcggcaagcttcagaaaaattcccatcagaacaaaaacgactgccgccagcactaatataatgcctgctccttttaacaacagcgttcatctccttttatccgtatcattcccgcggttccgttttctaaacaaaaaagacgccgcgcgggcgtccttttttaacctattcttttgctaaatcctttgcagcgtcttcccaagcctgtttgaactcggccgcattgtcagctgagacatatgtgccgcctcccgcttccgccgctttttcaaggctttcgcttcctttcatgccgaagttgaagccgatgatattgacgatcgtgttgacgttcgctttacggagcttttgaatttcggcctgaggattaccgccgcatgtttcttcaccgtctgtgatcagatatacgacgtttttccctgtggcgccggcccgctcaaattcttcacgcgtatcagagagcgctttcgcaatcggtgtccagccggtcggtttaatcttgctgagtgattgctcaaatggagtcacggcgtacggctgaaggccgtataacgtttctgtcgcattacatgatacggctttgcctgagtttttattattgcccttatgcccgaatacccgaagcatcagattcgtgtcttcaggaagaacttccgcaaaagaagtgacagactctttcgcaacatctattttacgctctccccctgttttttgtatcatgcttccgcttgcatcaaacagcacagcaacgtttgtttcttcgtgctttttctcagctgcaaaaacaggtgatccgagtgaaagcgtcaaaagtccgacaatccccgcagtgaacatttttttcatttccttcattcctctccgtttgtttttggccgatgggcccccggctcttctctatgctagatgacgtgtatgcaaaaagatatagggcgggattccttttgtataagcggctgtacgccgttaaaaatgaacagaattatgcgcatcatcctaaaaagattggataaatgatgacagatttaatgcctttttcgccctttttgtaatataagtccggaatctgattctttttacagttttctcttcatcttttcttgaaatttttgttaaataaaaataaaaaaaagggccgataaacggcaccttttcttattccgctaatgaactcgctgccattgtaaagatgcggttcatatccttttggctgtgagcttcgtaatattttcctccgcccgctttggcaatctcgtgaagctggccgttgaagccttccttaaagtcaaagccgatcacgttgactttaatatgctgtttgcgaagttctttcgctgtcttaacaggatctcctccgcatgtctcctcgccgtccgtcaacaggaaaacggatttactgccaagtttgtgcaaaccggtaaaggaagccttcgcatcctctaatgcttttgcaatcggtgtccagcccgtaggcccgattccgttaagagagttaaggaagctctgtctgtcaaacctttggaatccgtacacaccgcgaatggattcacaagattgaacctttccggagtttttattattgccttccgaaccgaaaaccgtcattctgacctgtgatttagatttaatttgatccgcaaaacggacaatttcttcttttgccatgttgtatttagaaacaccgtcaatccgttttgccatactgccgctcgcatcaagtaaaatggcggtattgtttttaaatgaaagagtcttctcgtttgcattctcgacagcaaaagcaggagatgcagcagtcagcatcaatccgagcatgagtatgagtgaaaatgtttttttcattgctttttccccttttcaatagatttacgttcaacgccgaacaatatttatcgtaaatgagatgaaaagggaaataaataggacggcgttcctcattatttttgcgtatattcacatagaagcggcatttttatcagtgatttacacccggcgctcagccttcaatcgacatttgtcagcctttaggctttcgttatatgagtctgttggttgctttaccgtttatggaatagttttcaaaaaaacagacgctcatgaaagcgtctattttttcgccatatatttgtttaaaaatgaatctgcttcggaaatgtccactccctgataataatgcttgacgatgtccgccactgattttccctgctccgccatgtaattggccccgtactggctcatgccgacgccgtggccgaatccttttgtcgtaatggtgatgctgctgccgtttcgtttccattcaaagtcggcagaacggagtccgagtttttcccggatgtctcttcccttcagctttttgccgttgatgacggccgttgccacttgatggcccggcgttctggctgtaatctgtcccaccgtgttttgtcctgagagctgtacgccgagcttttgctgaaactccggcacactgaaggtctgggtggcaagatatttcggcgattgcttatcccacggacttttcacgctttttaaataaggaatggcgcttgtccaataggcttccgcattttccgtatacccgttactcgtagagaagaaagatgcctcaatcggcttgttatcgtacgttaaaatctttccttgcgtgccggccaccgcgtttgtgattttcttgaggttgtgtgcgtacttagaaccccattcttttttcagctggcttttgctttgatagacttggaacatttgcgtatcatccaccagtgatcctttcggcgcctggacggctgagtcagcgaccatcagtctgacgatgaatgtccgggcggcgagcgcctgggcttttaaggcctccggtttaaaatctgcgggcatttcggaagccacgacaccgatcacgtactcttcaagcggaatgttttctacagaatgattggatgtccgataaaccggaatggatacaggtgattctttcaatgtttctgctccttttgtttctcgtgtggtgtgtgctgttttgtgtccgggctctctgtttacggctgctcctttttctgcctgaaacggaaggacgagaatggtggggactagaagaataagtatacacagcccggatagtagaaatacaatcggtttcatatatcagctgcctcctgcttgggattcgactctacttcatcttatgggcagggacaagctaatatgacttccttttggacagaatctttattccatttttcacgcgaaaaacgtattcttttttggaaatcagagcataataatgatgataaaccataaaaaaacagtatgccagattgacatactgtttttacagccattatgcgtttaggtcagttacgacttctttgctttcttgttcagcggccgtttcatcaacgacacgctcgatgtcagcgccgagagccgcaagttttttatggaaattcacataaccgcgatccaagtgcttcagttccgtgacgcgtgtatgaccttcagccactaatcccgcaagaatcagcgccgcgcccgcacgcaggtccgtagcggcaacttctgcgccttgcagctgtacaggaccgttaatgatcacagaacgtccttcaattttaatgtcgccattcatccggcggaattcttcagcatgcataaaacggttttcaaacacagtttcagtaatcatgcttgttccgctcgcacggagaagcagcgccatcatttgcgactgcatatcagtcgggaatcctgggtgaggcatcgttttaatgtcgatcggcttcagctgggcaggaccgatgacacgaaggccttctccttcatccgtaattttgactcccatttcttccatcttcgcaattaaagacgtaagatgctcaggcaccgcacctttgactaatacatttccttccgtgatagccgcagccaccatgaaagtacccgcttcaatacggtcaggaatgatgttgtgtcttacgccgtgaagcttctcgacaccttcaattttaatggtgcctgtgccggctccgcggatttttccgcccatcgcattgatatagttcgctaagtcaacgatttcaggctcttttgccacgttttcaagcgttgttgttccttcagctaaagcagctgccataatcaagttttctgtcgcacccacacttgggaaatctaaatagatttttgcgccctgcagacggccttctacttctgcttcaataaagccgttgcctactttgatttttgcacccattgcttcaaagccttttaaatgctgatcaatcggtcttgagccgattgcgcagccgcccggaagcgctactcttgaatgacccgtacgggctaacagagggcccataacaagcactgacgcgcgcattttgcgcacatattcaaaaggtgcttctgtttctaaagcgtaagaagcgtttacggtaacttcattattctcaaaatgcacatctgctcctaaatgacgcaacacttcattaattgtatatacatcggagagcgtaggtacatcacatattacgcttttttcttcacttgctaataaagatgcagcgataactggtaaaacggcattttttgctccttcaactttcactgtgccgtttaacttctgaccgccgcggacgatgattttttccaaggtattcccctccgcgtccctatattctctatattaatattcagtcgtcacgattggtgtgccaaccgtaacggtatgtttttcgcccattcccgcacttctaagcgcaacttgcacattcatcttatgtttcgatgtcatgatgtaatctgtccacttatatgtaaatgcagaaacagaaacgaaatgaggctcaactacatgttcaactggacttgcttcaaattctttcatgagctgttctgcttttttttgcaaaacaatactcatattatcatttaaatgacccttaagacaagtaaaaataaatactttattttgaaatatgtcatgtgcctgccgttcaaactgttcatatgtatcattccagttttccggttgctccgggctcatttgctcatataataaatacgaagttgggttctggtttttgagggtagtgacgagctgcagtttaaaagttgtgtgattttttttgtcagaatacgtgccgacggcctttacgattttatcttcccgcgcggattcccaatgatattgcggatactgcgtcttcagttcttttaccttgtcatcaaattcactcagtgacaggttcagattttttttcgcatgaagcgtccattcatctacagtgacctgctgccgctccattccttcggcaatctgggcaagcggagacagctcacttgcatgaatggaatgaaataccgctattaaggcgcttaaaaaaacaaaaaataagatgatgcggcctgctctttttttcttcatatcgatctctcccccttactcccatttttgccggagccggggaaagcaatacatggaaaacttcgtcaaaactcgccaagcgggtgaagaaaaattggtttctcacccagcgattcccttcatttcaacagacgaaacatcttaaaataagtatggaagctgtttcgaataggtaagataatctaaaaagaagtcagcgactgccgtaccgatcgcaatggtaagaagaatgatcagcagcctcgcctgcactatttttccttttcggatcagcggatcaaagttgacggcctgaagcgcccaccatgtcaccgcaatgcataccaggtgaaccaggatgctgattgcggcctgctgccccaatacattcacaaatcccatctcctttcattttttccgcccctcatatcctctcttattatataagaagaagagagaaagatgatcatttttacatcagaatttttatccaaaattaggggcaatccccgcttaaatgtccgttctccggcatgatatacttttttggaaaggagatgggaatatgaatcattccttttttcatccggaaaagcagtatggagaaacacttcccgtatttgaccacgagtgggaagcgatagcattctactatgattatagacagtctcaaacagaggaactgaaagaattatgtcagtttttcaacatttctcttgattattcacgcggcagcctgctggaagtggaagctctttacttccgcagcatacaagagctgcttttggcggattggaacctgccgattgacgaatttgagaaaatgctcagtgtgtatgtcatcgattgcgccatcagacaccatgacgatgccgaatgggtcgtcaaaccttatccgtatacggacggcgcctatacgacgggtgtgcggagaggaaacaaaacgtggcacaccgacaactgctgcgaacatttatatctgcaaaaagaagaggatcatccgcttatcggcgtctatgaatctcttatgcgttaatatagaaaaagaatccttctcagacagccgagaaggattcttttttagtttcctgcaacatccaatctgtttacagcccgctgtagcgcaagctcagcccgacgaatgtcagtatcatctgatcgtttgttcaaacggtcttccgcccgctttttcgcagcaagggcgcgctctttatcaatgctttccgctgtttcagcggcttgtgcaaggatagtgacctgatcaggacggacttctaaaaatccgccgctgacagccgccaattcggtctgcccgtcttttttaaggcggacagcgccgattttaagcggagccacggtcggaatatggccaggcaagataccgagatcaccgctctcggctcttacacttaccatttcaatatcagcatcatatactgggccgtcgggagtaacgatattgactttaacggtcttcatgcttttaccctcctaggaccagattaaacttctacacccatctcttttgcattctcaatgacttcttcaatgcgtcccacaagacggaatgcatcttccggaagatggtcatatttaccggaaaggatttctttaaagcctcgtaccgtttctttaacaggcacgtaagaacccttttgtcccgtaaactgctcagctacgtggaagttttgagaaaggaagaactggatacggcgtgcgcggtgaacgacaagcttgtcttcttcacctaattcgtccataccgagaatcgcgataatatcctgaagttctttgtaacgctgaagcgttgactggacttcacgcgccaccgcataatgctcttctccgacaatttccggagcaagcgcgcgggaagtggaagccagcggatcaaccgcagggtagatacccatttcagttaatttacgctcaaggttagtcgtcgcatccaagtgagcgaacgttgtcgccggagccgggtcagtatagtcatcggcaggcacgtagatcgcctggatagatgtaactgaaccaacgtttgtagacgtaatacgctcttgaagctgacccatttctgtcgcaagcgtcggctgataaccaaccgcagaaggcatacggccgagaagcgcggaaacctctgaacccgcttgtgtgaaacggaaaatgttatcgataaagaacagtacgtcctgtccttgtttatcacggaaatgctcagccattgtaagacccgtcaatgctacacgcatacgtgcgcccggcggctcgttcatttgtccgaaaaccatggctgttttcttgataacgcctgaatcgctcatttcgtagaaaaggtcgttcccttcacgagtacgctctcctacaccggcgaatacggaaataccgccgtgctcttgcgcgatgttgttgattaattcctggattaatacggttttacctacgccggcgccgccgaacaatccgattttaccgcccttgatgtaaggagcgagcaggtcaacaaccttaattcccgtttcaagaatttcaacctcagttgaaagctcatcgaatgaaggagctgatctgtggatcgggtccttttgagcatccgcaggcagcggttcatttaaatcaattttatctcccagtacgttaaatacgcgtccgagagtcacatcaccgacaggaacggaaattggcgcacctgtatcaacagcttccattccgcgctgaattccgtccgtagatgccatggcaattgtacggactgtatcatcgcctaaatgaagagcaacctctagcgttaggtcgatgcctacttcattttcgcctgtagctggctgtgaaactttaatcgcattataaatcgcaggcaagtggccgtcctcgaaacgtacgtcgacaaccggtccaagcacctgacttacgcgtcctttcttcatcgctatccctcctgacaaaatctttctattctaaagcggctgcaccgccgacaatttcggtaatttcttgtgtaatcgccgcttgacgcgcgcggttatatgaaagcgaaagtgaatcaatgagttctttcgcattatcagtcgcatttttcattgctgtcattctcgcagcgtgttcacttgctttactgtcaagaagcgcgccgtaaattaagctttccgcatattgaggaagcagcacttcgagcacctcttcttcatccggttcgaactcgtaagaagccgtgcgcttcccgccgctcgttccgaaatccgttaaaggcagcacttttttctccgtcacttcctgtgaaatcgcactgacgaaatggttatacaccaaatgcagttcatcaaaagcgccgtcgataaacatttgtaccgtctgacgggtcaaatctttaatctgagcaaaagtgacctcgtcgccaagccccactaactcagacaaaatcggcatttcccgttttttgaagaaatcgcggccgactctgccgattgcaatcaccgtgtattcatctttagactgatggcgttcttgaatggtgcggtaagcgtttcgcaaaaccgaactgttaaacgcacccgcaagcccgcgatcagacgtaatgacgagatacgccgtctttttcacttctcttgagacaagcatcgggtgtttcgcgtttttcgcgccttttccgacgttaaacacaacctcctggatcttatccatatacggagcaaatgacttcgcgttggtttccgcacggttcagcttcgcagcggataccatctgcatggcttttgtaatctggcttgtttttttcgttgacgtgatccttgacttaatatcgcgtaatgaggccaaagatttcaccacctttattcttcatttgcgtaaaaagagagaaaaagagaacctttttctctcatcttctaagggttagttgcttggtgcaaatgtgcgtttgaagccttcgattgcagctttgaagtcttcatcagcaggaaggtttcctgttttcgcaatgccgtcaagcagatctttatggttttgatcaaggtacatgtagtactcttcttcaaaacgtctgatatccgcaaccggaatatcatcaagatatccttttgtcagcgcataaagaatggctacctgtttttcaaccggaagcggtttattcaagtcttgcttcagcacttcaactgtacgcgcaccgcggttcagtttcgcctgagtcgcctgatcaagatcagatccgaattgggcgaacgcttcaagttcacggtatgaagccaggtcaagacgcaatgttcccgctacctttttcatcgctttgatttgggctgatccgccgacacgggatacggataatccggcattgatcgcaggacgcacgcctgagaagaataggtcggattgaaggaaaatctgtccgtcagtaatggaaatgacgtttgtcgggatataagcggagatatctcctgcttgtgtttcgacgaacggcagcgccgtaattgatcctgcaccttttgcgtcactcagcttggctgcgcgctcaagcagacgggagtgaagatagaatacatccccggggaatgcttcacggcccggcggacggcgaagaagcaatgacagctcacggtaagcggccgcttgtttggataaatcatcatatacgacgagaacgtgcttgccgttgtacatgaattcttcacccattgtcacccctgcatacggtgcaaggtacagaagcggagccggctgtgaagcggacgccgtcacgacaatcgtgtaatcaagcgcgccatgcttacgaagtgtttccaccacgccgcgcactgtagattctttctggccgatcgctacgtacacacagatcatgtcttgatctttttggtttaagattgtatcaatcgcaacagatgttttacctgtctgacggtcaccgataatcagctcacgctgtccgcggccgatcggaattaacgcgtcgatcgctttgatacccgtttgcagcggctcatgtaccgatttacggtccattacgcctggagcctggctttcgatcggacgtgttttgcttgtcagaatcggacccagtccgtctaccggctgtccgagcgggttgacgatacgtccgattaattcttcacctacaggaacttccatgatgcggcccgttcttttgacctcatcaccttcacggatatctctgtaaggtcctaagataacgatacctacgttggattcttcaaggttttgagccatacccaaaacgccgtttgaaaactcaacaagttcaccggccatacaattgtcaaggccgtgcacacgcgcaataccgtctccgacttggatgactgtacctacgtcatgaacttcaatttcagattggtaattttgaatttgctgctttatcagcgtgctaatctcttcagctttgatgctcacttaggtttcaccccttctatcgatttcctccggcaagttgacgttccatgcgctcaagctttccgcttacgcttccgtcataaatccggtttccaatgcggactttaatgccgcctattaaatccgtctgcacttcatttctgattctgagcgaagcgattccggctttttttgcaaacacttgagacaatgataacatttccgcttctgacagcggttttactgaataaacaaccgcgtcctctgtctgacgggcctgattggcaagtttgataaactcgtctgtgagatcaggcacaatcgaagaccggcggcggtcaatcagaagaaaaatcgtatgcagcacagactcagacagtgcgccgaacgattgctgaatcagctcttttttcttagcggccgataccttcggatggcttaacacttcctgtaatccggcttcgttccggaacacttcttttagtacggtaagctcttcttcgatttcattgatttgagaagtctcaacggcaatgtcgaaaagcgctgacgcgtatcgtttagagacagcagatccactcatcggctttctcctacctctttaagatagtcctgaatcagttgttcctgggcttgttcatcaagctctttttcaatcactttcgatgcgattaagacagaaagtgatgcgacttgctcgcgaagtgcggaaaccgcttgttctttttctttgacaatttcggttctcgccgcttctttcaatctttcagactcggcgcgtgcagcctggataatgtcttccttctgcttttcacccagttttttcgcattttcaatgagtgattgtgattcctgtttcgcttcttttaaaagaacgcgctgctcttcaatcagcttctgcgcttctttatttctttcttcagcggacgtaatttcgccggcgatatgatcttcacgctgtttcattatatttaatagcggtccaagagcgaatttcttgagaagcgctaataaaactagcatagccaacaattggaataggatatctccgccgttaaacgacagtcctaattcaagaggtaattgagacatctactacggcaactcccttctgcaggttttctctgctgataaaaagccgttttgggacggcctgcttatcagacataaagcaatggcgaaggttctcttagagtgatcttcgccatttttagttcatataaggcttttttgcttagccaaagaacgctaagaacgcgataacgacagcgataatcggaagggcctcaaccaatgcgatacccatgaacataagagttctaagttcttttcctgcttccggctgacgggcgattccctctaccgtacgtgaaacgatcagaccgttaccaatacctgcaccaagtgcacctaaaccgattgcaattgcagctgctattaaattcatgaaaaagttcctcctttaaaatgttatccgaatggatatatgattttaatgatcatgactgattttgtgtgacatgtacaccatcgtcagcatcgtaaagataaatgcctggatggtaccgatgaacaagctgaatgcctgccatgcaagcatcggaataatggctccgactgtgccgaccaaaccgagaaagaaactgtttgagtagaaattcgtcgccagattcgcaagcaggccaagaagaatttccccggcgaaaatgttaccgtaaagacgaagtccgagtgtcagcgtattcgcaaactcctcaatgatcttcatcgggaacataagcggaaccggtctgaggtaatccttagagtattccttcaaacctttcatcttcacgccgtaatagtgcgttaacgacacaaccataacggctagagtcagagtaatagccggatcggccgtcggtgatttccaccaaagctcgtgtccgaccgttacagaaaacggcagccctagcatatttgatacaaatatgtacatcagcaaggttacaccaagcgccaagaagttagcccctgtttttaaatccattgtactgcctataatattgcggacaaaatcaacaatccattccatgaagttctgggcttttcccggacggatggacagcgttctcgtagtgagaatcgcaatcagcagcacaatcacacttgccacagtaatcatcagaatgtttgtcagattaaaagtaagaccaaacaaatcaatagttctgtaatcgtgattcaatgggttttcacctctcttccattgatgaacgtttgagctgaataatggaatctatcataatgacgggataaattgtcattaatccaataatcacacttgccacactgactttatcgggatatttaaaggcgacagccatcgcaagtatcgcattgcaccaacgcgctgcgctcccgagtgatcgtatggactttcctttcgccacggccttgtcaaaagcattcattcttctggtcaagagccacaaattaaacaaactgaaaacagttcccaaaaagaggcctaaaaaaacagttttatacgccgtaagaccatatcccagcaaatagattgctaagattacaaatacatatctccgttgtctgctgaatgtaagattgggatcgtccatcaactatctgtctcctgatgaaaatgtaatataattcctggatacggcaaaacatgcggttaacccttgcagaaggccttttttgtccgcaaaacggcctgttcgaaaaaaccactcatcctcctgatgccacgggatgctgtttcattcgcttagataaatcctcatataacgggttttttggaggatttaaaatgaggatggatactagaaatgaaaggaatgaaaaccttctcataataccctcgtttagcatacaatagcccctaacatgtgtcaatctgtttaaagttaaaaaactttttataccgaaagcatacacagaatgttcacaaattcacctataaatgtatgaagtctgcccattcagcaaatatctggataaaaaaagaaaaccccctgaatgaggttttccgatttatttggttccgtacagtctgtcacccgcgtcaccgaggcccggaacgatatagcctttttcattcagtttttcatcaagggctgcgatgtaaatatcaacgtcagaatgatgtttctgcagctcttccacgccttccggagccgctacaagacacataaaacgaatgtttctcgcgccgcgctttttcaggctgtttatcgcttccaccgcagaacctcccgtagcaagcatcggatccacgacaataaattcgcgttcttctacatcagaaggaagcttgacatagtattccaccggttttaaggtttccggatcacggtataatccgacatgtcccactttagcggccgggattaatttcagcatgccgtcaaccattccgagacccgctctcaggatcggcacgataccgagtttcttccctgaaatcactttggatgtcgctgtttgaacaggtgttttcacttccacttctttaagaggaagatcacgtgtaatttcaaacgccatcagtgatgcgacttcgtccacaaggtctctgaaatcctttgtgcctgtattttcattccgaatatatgtcagcttatgctggattaaaggatgatcaaatacgtaaacctttcccatactgtgttcagctccttttttgttgtccgagtgactttttcacacttctattgattctacagaaaaagacaaacagtttcaagaaaatcataaaaaaacccgccggattaaggttccggcgggtttcttccttattaatagcctagttctttatataaaggaaacttttcagtcaaggcagatacgcgctgtctcgcttcttcaagttttgcttcgtcttcatgatgtttcagcgcgaggccgatgatggcgccgacttcttcaagcgcgtcaccgtcaaagccgcggcttgtcacagctgccgtaccgagacggattccgcttgtgacgaacggtttttccggatcgtaagggatcgcgtttttattagatgtaatgccgatttcatcaagaacgtgttcagcgacttttccggtcagaccgagagaacggaggtcgacaagcacaaggtggttatccgttccgcctgatacgagctgaatgccctctttgttcagagactcagccaggcgcttcgcgttcgagatgacgttttgcgcatatgttttgaaatcatcttcaagcacttctccgaaagaaacggctttggccgcgatgacatgcataagcggtccgccttggattcccgggaaaatggatttatcaatctttttgccgaactcttcacggcaaaggatcattcctccgcggggtccgcgaagtgttttgtgagtcgttgtcgttacaaagtcagcgtaaggaaccggattcggatgaaggccggctgcgacaagacccgcgatatgcgccatgtcgaccatgaagtaagcgccgacttcatcagcgatttcgcggaattttttaaagtcgatcgtgcgggggtacgcgctcgctccggcaacgatcagtttcggcttatgcgccagagctttttcacgcacatcttcataatctatatattgcgtgtctttatcgacaccgtattctacaaagttgtattgaacgccgctgaaattaaccgggcttccgtgtgttaagtggccgccgtgggagaggttcatcccgagcaccgtgtcgccgtgctctaaaatcgtgaagtaaacagccatgttcgcttgagcgcctgagtgcggctgaacgtttacatgctcagctccgaaaatctctttcgcgcggtcgcgggcgatgtcctcgacgacatcaacatgctcacagccgccgtagtagcgtttgccggggtagccttcagcatatttgtttgttaaaacagagccttgtgcttccattaccgcttccgtcacgaagttttcagaagcaattaattcgatcttagtctgttgacgcttacgctcatctttgatggcgttaaacacttgtttgtcttgtacaggtaaatgtttcatcagcgagatcctctcctatccgtttcctgttctttatttttaccacccttattgtacatggtttttcaggtgaatgtaacagcttatttaaaaaaatcacaaaatttaattagaaaacacgaacattatacaggaaaagcattttcatcattcgcattcataaacggcgcgaattccgcctatcagcttcggtcttgtccgggccatcgtcacatgtgcttctccaagctcacggcttgatatccggacagggacggcaacgggtttcagatgcatgccgatgaacgtatcgccgatgtcgatcccggcgtcagcctgaatcgattcggcgagcacgggagaacgcatctgccggtatgcataagaggccatcgctccgcccgctttcgggacgggaacggctgaaacaatggggagcctgaaccgctcggccgtttctgcttcaatgacaagcgccctgtttaaatgctcgcagcattgaaaagcaagatgcacacccgttttttccttaaaccggttaagtccgccgtatatcaattcagcccaatccccgcttccggcggtgccgatccggcttccggcggcttcacttgtactgcacccgattaccagcagactgccgtccgtcagtcctgcctgctcttgaaactcagtcagcatgtccgtccatttttgcttcatctcttccattgtccagcacctcttacagatttttttcttcgtaatctgcgattttgccgatccgccgttcgtggcggccgcccgtaaattcagtcgtcagccagacttttgcgatttcgcgcgccagccccgggccgatgacgcgttcgcccatcgcaagaacattcgtgtcattgtgttcacgcgtcgcttttgcgctgaaggtgtcatgggcaagcgcacagcgtatgccctttaccttatttgcggagatgctcatgccgatgcctgtgccacaaattaaaattcccctgtcagcttcgccgttcaccactttttccgctaccggaaaagcgtagtctgaataatcgacagagccggcgccgcattcacagcccatatcaatgtattcaatctgcaattcatccaaaagactttttatttcttcgcggatatggacgccgccgtgatctgacgcaatagctactttcattcatttacctcctaggtgtggctgggcgaagacagcccagtgtgcttgtcctttttattacgaaatccgttgatttcattctactctttcacattcgttttgcaaatgacctgtttgcagattttctgacagattacttgctttttccgccaagcaattgatcagccaaaagggtcagcagctcctccagttcgtcccgcgtttgtttataaacatcaagcggaccgccgaacgggtcagagatatcgccgttttctcccgttacgtattctttaatggtaaagactttgccctgactgttttgatatcggccttcaatcagctgtttgtgctgttccgtcatcgccagcaccagatcagccgtctcgatatgttcttccgataagggagatgaactgtgattgagagcgatccgtttttcaaacagcgcttccacggcatgggctgacgcttttccgttcggagacgcgaatacgccggccgaacttacgctgacgtccagccctttcgtttctgcaatggatttaaaaagagcctcagccataggactgcggcacgtattgcctgtacatacaaagattattttcatgtccgtcacctcttactgcctattataaatgaagaaaaaagaaacggcatcttcgtttctttttttacgtatcttataccggtaaaagcagtttcagcccgaatccgatcaaaatggctccgccgagcgcttcgctgtacgagccgagccacgactgcacctttcttcccgccaaaaggcccgcccatgttaaaacggtgctgaaaaccccgaacagcgtaacggccagaaacggattggaaccgttcatcccgagactgagcccgacagaaaagctgtccagactgacaccgaccgcaaacagcaacagtcccgagcctgccggagatatgagcggcccgtctgattgtttaaacgcggcgatgatcatctgcacccctaaaatgaaaagaagagatccgccgatgtaaacggcgagcatccccagaaaaccggacagcagatgcccggccgccattcccgcaagcggcatcatgacatgaaacagcccgatgacaacccctatatgaaaaatttgttttttcttcagctgaatcattcccattccgagcccgacggaaaaggcatccgtccctaaagcaaatgccatgatgcttaaggagacaagttccccgatgaatagattcgacatgaaataaaaacccccttggacgtgcccgcttgtttagcttatgcatgtccgatagggggtagaacaagttaatggataacggtgccgcctgcggctttcatcagcctgttcataatggcaagccccactccggtatccggaaaggactcagaaataatcatgtccacttccgcttcatcaaaactgcggagcgcatcgtataaggcggacgccactgtttcaaggtcggcgcgtctgccgcagaccttgatataatcagcctggtaactatcggcgttctcttctgttgtcagaatgccgattcgtttcccccggcttttatatgcgtctgccagttcttgaattctccgggcgccgccgtcggcaatagccatcggcgcagaaggcgcgtaatgtgtatatttcataccgggagaaataggaacctcatcttcttcggtcagccctttatccacaagaaccggaccggcggcggattcaatctgctcttttgtcacgccgcccggacgaagcagcacgggctgtttccccgtacaggacagaacggttgattccactccgattcccgtcgcgccgccgtccacaataccggcaatgcggccgtttaaatcatgggctacatgctcggccttcgtcgggctcggttttcctgataaattggcgctcggcgcggcgatcggcagtccggccgagctgatgagggctaatgctaccggatgatcaggcattctgaccgctaccgtctcaagtcccgcggtgacacggggtgacagcacaccgggcttacacggcagaacaagggtcagcgcccccggccagaatagcttcataagctttttcgccgtctcaggaatatggctgataaaacgatcaagctggctgatatgggatatatgcacaatcagcgggttatcgctcggccttcctttcgcctcatatattttcgttacggcttccgtattttcagcgttagcgcccagtccgtaaacggtttctgtcggaaaagccacaacctcattctgccgcagcaattccgcggcttgtgtaatctggggatcggttgtggataattctgcggaacaatccacaaaccatcttcttgttttcatgtagaaccaaactccttattttaaagcggtaaaactttattttctctcgtgtattccttttgaaagtataaaagatgtcctttaataaaacaagtgttatccacaaactgtggacaacaatttttaataagtggataaccttgtgtataagttagatcaggcagaggttttcaccattaaaaacgaaccttctgtgcataacgagttgcggaaatgttcggacgtatacagttcatcaggcgcatcggcgcacgcttcaaatcccatcacattcagaaactcagcagatgagggctgattggcgactaagtagacatcttgaatctcatgttttttgcacagcacatccatactttgaaacagtgtaacgatatggctttgattcagcctgtccgacatgacgagtgaacggagaagcccttttccgccgctgaatttttcgatcccgagacaggcggcaatcattttttcgctgtcttccagtacgataaaccggctgatctgctgatcgatttccgcatgtgccgtatcagcctttttcaaaaaggcctccagcgcctccgcatcttgatctcttgccactctcagctgataaaacatatatttccctccgtttcgatcaactctttcttccaatctatgaatcgaatccggatttatgccttttacttcaggaaaatagatctgaaatccaatcgacgaggaaaaacttcacttcggtatcatcgtcatctttattttctttcttcgctttatcagcctttgcttttacgtcatccagcacttttttagtctgtttctgcgtttcttcctgcttctgtccgccgtcttcctgatctttcaccgcttcgccgtttgagaaatcaaggaagcacagcggcggaaacaagacgcaccaccagttggcgccctcgccattgccgagtgtaattaaaatcgcttcatattttccggccggatagaccatattgccgtagagctttgtcggaaacgagattttattgaattgaactgaaacggattgatgcgcacccttttctttcatcgtctgtttggcgatttctttaatttcaggaagcttcgaacgaatgagccgccgcgcttcttcaatggaagtgatatctttcacccagtccgtaatttgcttgtttacagcatctctgatctggcgcttgagcttttgatcctcatcgttatcactgttggccaaaattctgagccggatcgcttcatccggtatgacgacgggctcatcggctgatgcccgcgccgtttcttcttttgtcaaacccgcaagcgctcctgataataaaagaaaaatatatatgcagatcatcattgtctgtttcatcggtccccaccgttcctctccgtgctttttttatctagtcccattatggacatgacggaaaaggtttaaaccggcgggaagaaaaaaatctagcaagctgataatctgcattgacagattcaaaatatggtacgatattattttgataggaggttttcagatgaaatataattacaccgtgctgctgtcggcggcatgtatgtctgtcatttattctattttgtatgttcatcaattcattatcgcggctttcatttcgatggcgttttattttttgtttccttatttgatttttgcgctgccgcttcaatactttctgaataaaaagccgaagagatttcatccgctgtattttctttattatttaggggtgtcattcattgcaaacgggatcatcttcggtcttttgcagccgtcaggccaatctctgttttctaattcagccttttatatctttgcggttttaacagccgtcgtctattgggtatgggattccgtattgctgcaaagacaaaatccggctgcagaagcgtaatcagcagacagccggctgaagggagagcggcgcaaaagaaaacggcggccatctttaaacgggcgtgccgtccttcttctgtttcagaatgataattggcccgctgctccgctccgcttacggccaacccggaaacgatgatcgctgtgacgataagaacagccgtaacggcgccgaaaatgatgtcaacgccaaacggcagaacaaaccccgccgcataagctgcggcggcgagtatacatccgaaggcgaacgcttttttcaaggcggatgcccctttcattttctttccattgtaacaaaagcccgccgtgtgcgtcaccggcgggcttttttcatgatgtgatgaccgcggatacggttctgtcttttccgttgatgtcctgtacgacttccacttccgcattcggaaaggaatgacggaacaggtctttcacggctttcccctgattatatccgatttcaaagacgacaagcgctttatctttcatgacaagaggcagctcctccataaaccgcttgtagaatttcaaaccgtcaccgccgtccgtaagagcatgaagcggctcatggaaacggacgatatccgacaaatccgccatttcttcttcagaaatatacggcggattggaaacaataatatccgcttttttccctgatgaaataaaaggagttaacagatctccctgcaaaaaacagacgtccgctccgaggttttgcgcatttctttccgccacctgcagcgcttcttttgaaatatccgaagccgatactgaaaaatgtccgcattcaagggcgagcgtcaccgcaatggcaccgctccccgtaccgatatcaatgacgttcagtcgttctgcctcggaaaatacccgcttttgtctgtccagcagatgaaagacgacttcttccgtttccggacgcggaatgagaacatcgtcattcacaaaaaattccctgccgtaaaactgttctttcccgataatatattgaatcggaataccttctttatgcatctccacgtgccgcctgaatcgataaagctcgtcctcgccgacggcctcctgcagacttgcgagaagcttgctccggtccattccggtatcatttaacaacagcagctcggccgcgtttttttctcttcccgcttcggttaaataagaagaagcccagcttagggcttcaaaaacggtcttcatcttaattttccgcctgctggagcttgcttgactggtcttctacgattaacgcttcaaccacttcgtcaagcttgccttccaggatttgatccagcttttgaatcgtcaggccgatgcggtgatccgtcacacggttttgcgggaaattgtatgtgcggatacgctcggaacggtcgcctgaaccgacggctgatttacgggtctgatcatattcagcctgagcttcctgctggaatttgtcatagattctggcgcggagcaccttcatcgctttttctttgtttttaatctgagatttttcatcctgacaggaaacgacaacaccagtcggtaaatgcgtcaggcgtacggccgacatcgtcgtgtttacgctttgtccgcccggtccgcttgatgcgaatgtatcgacgcggatgtctttttcgtgaatgtccacttctacttcttccgcttcaggaagacacgccaccgtcgccgtggatgtatgaatacggccgcctgattccgtttccggaacacgctgtacgcggtgcgcgccattttcatacttcagcttagagtatgcgccttttcccgtaatcataaagatgatttctttgtaaccgcccgttccggtaacgtttgcttccatgacttcagtcttccagccttggatttcggcataacgggagtacattctgtagagatttcccgcaaacagcgcggcttcttctcctcccgctgctccgcggatctccatgattacgtttttgtcatcgttcgggtctttcgggatgaggagcactttcaaacgctctgataaggtttccgtctctccctgcagttcggagatttcttccttcaccatttctctcatatcggcatcaagcttttcctcaagcatcgctttcgcatcggcaagctgttctgatgcgtctctgtattgtctatagacttcaacggtttcttgtatatcagattgctctttcgaatattctctaagctttttcggatcgttgaccacttccggatcacttaaaagctcatttaatttttcgtatcgttgttcaattgactgtaaacggtctaacacggtcttcacctctgttttcctgtgcgtaacattctcattatagtatagggcttatcgccagtcaaaagcaattcgcctctgttatactgaagcaaaaaaggaggggcggatatgctgaaatccatccaccatatagcaatcatatgctctgattatgaaaagtcgaaagctttttacaccgagattctcggcttcggcattataaaagaaacataccgaaaggaacgggaatcttataaacttgatcttgcgctggacggcgcgtacgcgattgaattgttttcctttcccgatccgcccgaacggccaaccagaccggaagccgcgggtctccggcatctcgctttcaccgtaaacgatcttgaagcagccgtcagagagttaaaggaaaagggcgtcggcacagaaccaatcagaaccgatccgctgacggggaaacggtttacctttttctttgatcccgacaagcttccgcttgaattgtatgaagcgtaagttttttgaagaaatgccgctttctttggcgaattccttcttgttttgtctaacatgaagggaacgccgcctcatggtcgaatacctagcaaaaaggaggtatgtgatcatgaatacaaacatggccgcgaaagagctcggcgtctccgcaaaaacggtgcaaaggtgggtcaagcagctgaatcttccggctgaacggaatgagctcggacattattcctttacacctgaggatcttgatgtgctgaaatcggtcaaacggcaaatttctgaaggcactgcccttctggacgttcaagtgccccggcagccgaaaaaacggacgggcttcattttgcagcgtccgaaaatcaatggcggcgctgaacaaagattggcagagctggagcgcaaactggacattctcacgaaagagaaacaaggtgagaaccatctgctttcaaggatagaggagcttgaacgccagctgaaacaaaaggcggatgaaggggtgtcttatcagcttcttcagcacaggcgggaaattgacgacctcaataccgaattgcagacattggcctcccgcatccaggaacttgcccagacagctcccctctcagaaacagccgcttcttcagaacataagaaacccagaaaaaaaacgagattttcaccttttaaatttcaattctaactaaaaaagctccctgaaacagggagcttttgattatgcagtcagcgcaatgatgatcggcagtgagatgagagataaaatcgcactgatcacgaacgcggacgcagtttcttcctcttgtttttcgaaacgtgtggcaatcatcgccgctaccgcagatccagggaatgcaacgagcaataccgctttagtgatctggtcagccggaagtccgactgcaagagcgatcaagtacatcagcgcaggctgaacggcaacttttaacaaagcgataccgaaagccggcagactgagcttaatgttgcggataccgacagttacaccgacggcgaagagcgcaacacctgatgttgtgcttccgagctgatcaagcattttttctcccaagccagggagtgttacaccgcagagtaccagaatgatactgataagcggtgcagccgcaagcggttcggaaagaccgtgaagaatagacttaccagtcattttccagaagttctcgttttcagtgtcttttttcttagatgactcaccgacagtagcgataatgatcgcaagcgggtcaaggatggcgttaaccacgatacccgtaacggcgataggaatcgctacttcgcttgctccgaataagcttcctagtacgggaatacccataaaagcaaatgtcggttgtgcagagtttaaagaaaatacagatgaattcgttaaatcatacttgaagataaatttgcaaaccaacagaatgacgataaagaatccgacaatcccaatgatcaaagcgaccatcaaaggaacctgtgataaaaacgcacttcttgaagtggttaaaatacttgcgataaaatgcgccggaagcgcgtacttcgtaactaaggtgcttaccccttttgctgacttcgcgtcataacttccgaagcgacctgcgaaccatcccagcacgatcacgaaaaagatcggcgccaggaggattaaaatatctaagaagctcaaaatgttctcctccaaatccttaatgtccgtatactttagcctttacataaaagctttccctcggactgtaaaattaatcgtaaaaattatttagcgacaacttgtttatattgcggtttccacattgcatcaagaacggcttgttctacattttcaggaatgcggtttgccacgccttctttaatggcagtttccgctacggcgatcgcaactttaattgaaacttcttgtaagtcgctcatgctcggcagaaggcctgcacccggtgtttcaaaatcaacgctttctgcgattgcgtcagcagttgccgcaaacattgcaggagtaatcactttcgcttctacaacgattgaaccgagaccaagtccagggaacgcgaatgcgttgttagattgtccgatttcatgagaaacgccattgtactctacattgtcaaacgggcttcctgtcgccacaagcactttgccgtcagtccatttgaaaagatcgctaggaacggcttcagcaagcggtgtcgggttagacatcggcatgatgaccggacgctcaacgtgttttgccatttctttgacgatttcttcactgaacgcgccgctttggcctgatgtaccgattaagattgtcggtttcgcttgacggatcacttcaatgaaaggaatttgtccattttcatcgcgtttccaatctttaatttcttcagctgtgcgcaggtacggctcttggaaatcaagaatgttttccataccttcaattaacaagcctctgtaatccattgtgtagaacgctttgttggcttcttcttcagaaagaccggcaagcaccatagtgtcgcggatttggtcagcgattccgattccggcagatcccgcaccgaagacaaccacacgctggtctttaatagacgcgcctgttttcttcatagccgcaagcacacctgcaagcgtaatcgcgcctgttccttgaatgtcatcgttgaatgtaagaatttcatggttgtatttcttcatgatattgcgcgcgtttttgtttccaaggtcttcccagtgaagaagagctttagggaaatatttaagcgcagcttttacataagcgtcaacgaaagcttcgtaacgttcgccttggatacgttcatggcggttaccgatgtataaaggatcgttcagaagtttttcattgttcgtaccgacgtcaagaacgacaggaataacacggcttgggtcaataccggcggcagctgtgtataccgctaatttaccgatggcgatgttgataccgcctacaccccagtcaccgattccgaggatgctttctgagtctgtcgcaacgatcagatcaatatctccggcagtggcatgaaggttttcaaatgcctcttcaatcccttccacgttgtcgatagaaaggtaaatcccttgaggtcttctgtactcatggctgtattcttgaatcgcttcaccgacagtcggtgtgtaaacaaccggcagcatttcacgaagatggttttgaagcaatttaaagaaaagaacttcgttacggttttgcaaatcattcaaatacacgttttggcgaaggcggtccggctgagcttgaaactgctcgtatgcgcgttttgcctgctcatcaagagacagaattgtcggaggaagcagcccgtctaatccaaggctttttctttcttctgctgaaaacgcaacacctttatttaaagtagggatagatagaacttcttttcctcttaaagtagtttctaagttgccttccttcgttactttaatattattcaagaaaatctccttctttcttcaaatagttaacaaagttaagtaattacccattttggctagtgtgatcgcgatctgctatatctttttttgacaattattcgaacaatgtctcataactatttacattacttagtcattttatgcctgtaaaaatgaaaattcaagagatgaaaattacttaattttttcatactcttttttaagttatttaactacaatttttgaaaaaacgtcaaaaaaacaccggattttttaccggtgttttcatgaaaagggttatttatcagtctgtttttttcggcacttcgtgatgatgtctgcatctcgcttcgtatgactccgatgcgccgactaaaatgaccggatcatcataggaagcgggcttcccgtcaatcaaacgctgcgtacggcttgccggcgacccgcaaacggagcagaccgcctgcagcttcgtcaccgattcggcaaccgccatcagattcggcaccacgccgaaaggctctccccggaaatccatatcaagtccggctgcgatgacacgatagcctttatccgcaagcgaggataagtcgccgatgatcgattcgccgaaaaactgcacctcatctaccgcgatgacgtccgtgctttcactgatatgatcccatatttcagccgaagacgagatgacgtggcttgtcatggatgtgccgttgtgagaaacgacggcctcctcactgtagcgattatcaatggcaggtttgaacaccttgacctcctgcttcgcatatgtcgctcttttcactctgcggatcagctcttctgatttcccagagaacatgctgccgcatatcagctcaagccatccgctttgcttcattatgtacataggctatccgctcccctttttttcctgtttatggacataaaaaacaggcaagaagcaattcttgcctgcctgtaaaatctattattacttaagaccgtattttttgttaaagcgatcaacacgaccatcagcagaagcgaatttttgacgtccagtgtagaatgggtggcattcagagcaaatctcaacgcgtacctcttcttttactgagcctgtttcaaattcatttccgcaagcgcatttaactgttgcttttttgaaattaggatgaattcctgctttcattgtatccatctccttccgccctgaatcccgtgtggaaacagagttattattccggagtaatccggaacgcatatgagagaattatatcagtcatttactgcatttgcaaatacattttttatcagcggcgggctgatgatgaaaggtttgcctgcttccattcttggttgatcagatcgaagaattcctgattcgtttttgtttttttcatttttctcataaacttctctgcgaagtccggagaatcagacatcgatttgcggatcgcccatagacggtcaagatgctctttcggcacgagcagctcttccttccgtgtgccggagcggcggatatcgatcgccgggaaaatccgtctttccgcaagagaacggtcaaggtgaagctccatgttgcccgttcctttaaactcttcatagatgacgtcatccatccgggagcccgtgtctacgagcgccgtcgccaaaatggtcagactgccgccctcttcaatgtttctcgcggcaccgaaaaagcgcttcggacgatggaacgcagccgggtcaatcccgccggaaagcgtacgtccgcttggcgggataacgaggttgtaggcccgtgccaggcgggtaatgctgtccatcagaatgataacgtcttttttgtgttcaacgagacgcatcgcccgttcaagcacaagctccgctaccttaatgtgattttccggcacttcatcgaacgtcgagctgacgacatcgcccgctacggaacgttcaatatccgttacttcttccggtctttcatcaattaagagaacgatcaattcagcgtcaggctgatttgtcgtaatgctgttagcgatttctttcaacagcatggttttaccggctttcggcggcgccacgatcagaccgcgctggccgaaaccgacgggagccatcatatcgagaattcttgttgagagataattcggtttcgtctcaagcaccatttggcggtccggataaagcggagtcagcgcaggaaaatggacgcgctctttcgcagattccggatcatctccatttaccgcttcaacgtgcaaaagtccgtaatagcgctcgttttctttcggcggacgcaccttgccggatactttgtcaccgtttcttaaatcaaagcggcggatctgggaagcagaaatgtagatgtcttctgagcttggcgagtaattaatcggtctgaggaagccgaatccttccgattggatgatttcgagcacgccttccataaacagaagatcctcctgctcggcgttggctttcagaatggcaaagattaattcttttttagtcagtttgctgtagtaggagattttataatgtctggccagttcatatagttcttttaatttcatattttccaaagaggaaatagatacgtctttcataaaaacaccacgcttttcatagtcaatgtattgctgttttcattcaaatcggctgcttcgcatgattccgccaaagcacattcttttataaaacgttcaggaacttctatcggtaacacttccacccatgatcggcgcttttttaaaaaaggaatgtcttaatgagttttgaaggaagcgaggacaaaaacttgagaagatcaatatttatatcgtctgtatgcggtagaatttgaaaatttcccagtactcaaaagaaggaatgacacagaaaaatcgcagcactctttatttttacctcatttcaaaaaattattcaacttaaataatgctttgacatataaatgatagggttgactctttattgcaaaagaaaagcgggactttccgtcccgcttttctctatttatggccggatcacaagatttggttttttcttcaggctgtgtcttccgtcaacgaatcggaccgttcctgatttcgcccggatgaccagactttcagtcgtgccgacggagcctttgaactgaacgcctttcagcagctctccgtccgtgacgcccgttgcggcaaaaatggcgtcatcccctctcacaaggtcctccatccggagcactttggatacatcaaggcccattcgctcacagcgggcctgctcttccgcactttgcggcagaagcctgccgatgatttcgccgccgagcgcttttaacgcaacggcagacagcacgccttcaggagccccgcctgaaccgaagagaatgtctactcccgtatggtcaaaggccgtattgatggcgcccgcgacatcaccgtcgttgatcagtttgattctggcgcccgcctcacgcaattcagagatgattttttcatgtctgtcacgatttaaaatggttgccacgacatcttcaatgtctttgtttttcgctttcgcaacggcttttaagttatcaatgacaggcgcttcaatatcgatgcagcctaccgcttcgggaccgaccgcgattttttccatatacatatccggggcgttcagcagtgttccatggtcggcgaccgcgatcaccgtcagcgcattccagccgccgctcgctacgatgtttgtgccttcaagaggatcgacggcgacatcgacgcgcgggccgtatccgtttccgagcttttcgccgatgtaaagcatcggcgcttcatccatctcgccttccccgatcacgaccgtgcctttcatcggcaccgtgtcaaacacatcacgcattgcgcttgtcgccgcatcatcagcttcatctttttttccgcggcccatccatctggcagatgctaaagccgccgcttcagtgactcgaaccaattccatcgataagcttctttccatttcaacacgatctcctctcaaaagtccgcatttctatgaattttggagctgttctatctcttcgtccgtcagcctttgccgccagattgtggcgcccagaccttcgagttttttctcaagattgctgtagccgcggtctaaatgctcgagaccggtaatttcggttacgccgtcagccatgagcccggcgacgaccagacaagcgcctgcacgcagatcgctcgcctttacttttgcgccctgaagctcggccggaccggtgataatggccgacctgccttccactttcatgttggcccccatccgtctcagctcatctatatgtttaaatcgggccgagtagatggtgtcggttacgacgctcgtgccgctggctctcgttaacagagatgtcatcggctgctgaagatcagtcgggaatcccgggtaaacaagcgtttttacgtcgaccggttttatctgcttctgcccgccgagcataagaagctgatcgtcactcgtctcaatgtgaaaacccatttccctgagcttcgccgttaaagactccaggtgagtcggtatgacattatcaataatgacttctttccccatcgcggcgccggcgatcataaaggtacccgcctcaattctgtccggaatgatcgtatgcctgcatccgtgcagctcttttacgccgtcgattctgattacattggttcccgcgcctttgatctttgcgcccatgctggtgagcaatgtggcaacatcaataatctcaggttccttggcggcgttttctatcacggttttaccttcagccagtacagcggcaagcatgatattgatcgtcgctccgacgctgacgacatctaaataaatccgtgcgcctctcagcctttcggcgcgcagataaatcgcgccttgttcattggtgacttccgccccaagcgcttcaaaccctttgatgtgctggtcaatcggccgcggcccgagatggcatccgcccggcagtccgatgaccgcctgtttgaagcggcccagcatcgcgcccattaagtaataggaagcgcggagttttttcactttgccgttgggaagcggcatgctgatcatcggggaagggtcgacgaccatttctcctttttcaaaatggacgtttccgccgatttctttcagcaggtcacgcagcgtttcaatatctgagatctccggaagcccttcgatcgttacttcggaatttgccagaatggttgcgggtatcaatgcgacggcgctgtttttcgcgccgctgataagtacggttccgtttaacggatcgccgccggcaatattcaacttttccatgatagtctccttccataagaagatagctgcggagcgtaaataaaatggcattttattctgtctctgcaaataaagctcttgtccaaaatgtagccaattcgaagagaaagaatacaaggacattataaaataacaggaagaaaatagcgaagctttgcggggcatttttaacacaggatgcacagaggcccgccgggttcacattccggggaaacacactcttcactttgatactgaaggcccgctgccaaacaggaaaacataagggtgcggcaaacggatgcaaccggtttgccgcccttttcacccttatttattccagtctgccaagaattgctcgatgcctttatccgttaacggatgtttcgccagctggtgaatgactttcagcggcatcgtaccgatatgcgcaccgcgtaaagcggcttcagtcacgtgctgcgcatgacggatggaagctgcgatgatttgtgtatcaatgtcatgaatgtcaaaaatctgtcttatttctgaaatcagttcaagaccgttatggccgatgtcatccagacggcctaagaacggagatacataagtcgccccggctcttgccgccaaaagcgcttggttggcgctgaaaatgagcgttacgttggttttaatgttcaggtcgctcagcgcttttacggcttttaacccttcagacgtcatcgggattttcaccgtgatattcggtgcgattttcgcaagttctttaccttcttcaatcatctcttcagcattcagggaaatgacttccgcgcttactgatccgctcacgacttccgtaatctcacgaagtctgtcatggaaagacacgtcagcttctttcgccactaaactagggtttgtcgtaactccggcaagaacgccaagttcataagcttctttaatctcgtcaatgtttgctgtatcaatgaaaaataacataaggaaagcctccccagtaataaattttcagaactgtaaaacatgattgcgctttctaaaggtaagacataaaaccgcctgtcaatgctgtcaggcggtttatggatgttacattggattaagcttggtttgaagaaccgaactcacgcattttgccgataaccgtttctttgatcgcttcacgagcaggtccaagatatttacgaggatcgtattcgttcggcttagctgccaatgtttcgcggacagcttttgcagaagaaatttggttttcagtgtttacgttgattttagccgtaccaagtgagattgattttttaatgtcggcagtcggaattcctgtaccgccgtgaagtactaatggaaggccggttgattttccaatatcttccatttccttgaagccgaggttcggttcgcctttgtaagggccgtgaacagaacccagtgcaggtgcaaggcagtcgatgccagtgcgctctacaagttcttgacactctttagggtcagcatagattacgccttcagcgatcacgtcatcttcctgtccgcctacagttccaagctcagcttcaactgaaacgccgtggaaatgagcaagctcaaccactttagctgtagttgctacgttttcctcaaacgggtggtgagatgcgtcgatcattacagaagtgaaacctgcatgaatcgctttcgcacaagattcaaagcttgaaccgtggtctaagtgaatggcgacaggaactgtcactttgtattcttccataagagctttaaccatggcaaccactgttttgaagccgcccatgtagcgtcccgcgccttctgaaacaccaagaataaccggggatttttcctcttctgctgcttgtaaaatagcttgagtgaactcaaggttatttaagttaaattgtccaacagcatatcctttttctttagctgtattcaacatttccgtcattgaaactaaaggcatgtcgaaagtcctccttatgtagcctgatttgcttcttctcgaaaaaagctttccacctatagcatgaccataaaaacctgtcatatgtaaaacaacagatcgctttttctccatctctaggataccaacttttcgacaaatcggcaacacaatgacataattgtttctaattttattaattcgattttagaggtaaatattttttcaccgcgtctctgatctcatcaatgtcaaaaggtttcgcaaaatgggtcagcgctccgagctcttttgattccttaatcatatcgagttctccgtaagcggtcatgataatgacgcggatggattcgtcgatcatcttcatgcgcttgagaatttcgattccgtccatgccggggattttcatatctaaaagcacgagatcgggccgttctttcgttacgatgtccagcgcctgtatgccgttggcggcctgaaacgtctggtacccttctttatgaaacacttcattgagcaatatgcgtataccgtattggtcatctacgattaaaatcttttcattcatcattttacaccccaatattatcattttcgtcaaaaggaagcagttgtttatgtattctgtttgattttcacatttcctttaattataatagtctactttccgacattttctgagcattttctcttttgttgtatactgttcttgtatgtgtaaaggaggtttcactcatgttaaagatatttacaacgcagcttgcaggcattttttcccgcattcaggataaggaatccgaagcaatagaagacggcgcgcgcctgctggcgcaggcagccgtcagcggccataccatttatttatacggcgcaaatgagatgcagggcattttgtgcgaggcggaactcggctcagaaccgatgccttccgtcaaagcgtttccggatacagctgattcgattacagaaagcgacagggtgctgatgttttgttcaggtccgggcacggctgaagaacaggcgctggctcaaaagctttatgaaaaagggatcggcctcgttggcgtatctcctgtcatcaaagatcaaaccgggattgaggaattttgtgatgttcatattgacagcaaattaaaaatgccgcttctgcctgatgaagacgggacaagatacggctttccttcattaatgacaggcctgtatgtctatcacgcactgtcctttacgttaaaggaaatgatgcaggaatatgcctgatgcagaaaaaagacttgccgcttttaaaggaggcaagtctttttttattacttctgttctgcagcttgtacggaagcgccgataaagtctttgaataaaggctgaggtcttgtcggtcttgatttgaactcagggtggaactggcaagcgacataccaaggatggtctttcagctcgatgatttccacaagacggccgtcagggcttgttcctgagaacacaaaaccgttctcttccatttgctgtctgtattcgttgttgaattcataacggtggcggtggcgttcgtataccacttcatccgcatacgcttcgaaggctttcgtgtcttcctgaagcttacaagggtacagtccgagacgaagcgttcctccgagatcctcgacatctttttgttctggcagaaggtcgatgatcggataaggagtggacggatcgatctccgcagagtgagccccttccagacctaatacgtttcgcgcatattcaatggatgcaatctgcataccgaggcagatgccgaagaacggaattttattctcacgcgcatacttggcggcgatgattttcccttctacgccgcggtctccgaaaccgccgggcacgatgattccgtctgtgccgctagtcagctcttgaatattgctttctgtcacttcttcggcgttaatccatttgatcttcacatcagcgtcaaacgcatagccggcgtggcgcagtgattcaacgactgaaatgtaagcgtcctgaagctcgacgtatttaccgacgaggctgattgtaatggttttagacaagtttttcactttcgtgacaaggtctttccattccgtcatatccgggtctttgcattctaatttcatatgatcgcagacaagcttatcgagtccctgctcctgaaggttaagcgggatggagtaaaggttgtccgcatcttcgcactcgatgaccgctttcgtgtcaatatcgcagaagagcgcgattttatctttcatatcttgagaaatcggcatttctgtgcgcacgacgatgatattaggctgaataccgaggcttctcagctcttttacgctgtgctgcgtcggttttgttttcagctcgcccgccgctttgatgtacggaacaagcgtacagtgaatgtacatcacgttttcgtggccgatgtcgcttttcatttgacggatggcttcaaggaacggaagggattcgatgtctcccactgttccgccgatctcagtaatgactacatctgcgtttgtttctttgcctgcacggtacacgcggtctttcagttcatttgtgatgtgcggaatgacctgaaccgttccgccgaggtagtccccgcggcgctcttttttcaatacggcagaatagattttaccggtcgtcacgttgctgaatctgttcagattaatgtcaatgaaacgctcataatgccctaagtcaaggtcagtctcagcgccgtcatcggtaacgaatacctcaccgtgctggtacgggctcatcgttcccgggtcaacgttgatataagggtcaaatttttggatggtgacgctcatgcctctgtttttcaaaaggcggccaagtgacgcagccacaattccttttccgagtgatgatacaactcccccggttacaaaaatatatttcgtcatttcgtttgctcctctcttcggtctgcgctacattccttaaaatgtgccgttttatagaaaatcatttcactaaaaacaaatgatgtgtaaaagaatttgggagatgaaaataagaaagctccctttcaatttcttgaaagggagcgtagcactcttatgaattctcttctttttgaagagcccaaaatacatactacatagttcgacaatgaaagtcaagatcgttttgctgatataaaatcagtctttgcgatcctcttcctcatcatcataatcttcctcatcttcttcaatcatctcgtcttcgatctcaagctcgtcgtcatcttcctcatcgatatcttcgtcgtcaaagctgtctgcttcaaggtcaatatcttcttctatttcatcgagatcgatgtcatcttcgtcaacttcctcgaattcatcaaggtcgagatcttcctcaacgacttttttcgcttttttctttttcgcttttacagtcggctgtgtttcttcgtccagctgatcgtacggataccagctgcgaagcccccacgtctggtctgacagagcaataaagcggccgtcaatgttcaggtctgtataaaattgggcgatacggtcgcccagttcctctttcgtaacaccgagcaaggagatcatttcattcagcagctcctggaacggaaccggttttttatgttctgagaaaatttcgtgagcgatttcaactaaagccatctgcttcagctgttcctgagaatattgtttgatactcaaggtcggacactccctttctattacttatatgtatctgtttctatcctataataagaacgaatttgtattgttttgttcataaaccatacctctcattataaacaaattaaaacagaatatgctacccttaacagcgtaatttaagaaattttagagccgtcccttcataaatcggctgatgtgcgaaaacaaagccgccggcatatgcgccggcggcacgcttctttctataaagactcttgtttttcagcgccgaatacagacatggcgagcaattcactgacatcataagtgccgatcgcgtcttcggcttctttcgctttcgtaccgtcgccgagcatggtcagacagtaaggacatccggaactgatgaccgtcggactgacagaaagcgcctgctcagtccgggccgtgttgattctcgctcccgtttcttcttccatccacatgagccctcctccggcgccgcagcacatcccgttttcgcggctgcgctccatttccttcaattgaacgcccggaatggcttttaagatcgctctcggcggctcatacacttcattgtatcttcctaaatagcacgagtcatggaaggtaatcgtttcattcaccgggtgaagcggttttagtttcccctgtgacacaagctcggctaataattcagtatgatgatagacttcggcccggaatccgaaatcaggatattcatttttgaacatattataggcgtgcggatcaatcgtgacgatttttttgattccgtgtttttcaaattcgccgatgttgtgttccgccagctcttggaacagaaactcgttgcccaaacggcgcggcgtatcgcctgagtttttttccttattgccgagaatcgcaaaggatacgcccgcttcattaagcagctttgcaaatgagacggcaatcttttggctcctgttatcgtaggaacccattgatccgacccaaaacaaatagtcgaactctttgtcttgttttttcatttctttcactgtcggaatttctgtatcagcctgctcccgccagttctcccgctctttccggtttaagccccacgggtttccctgtctttcaatgcttgtcatggcccgctgcgcgtcgctgtccatcttcccttccgtaagcacaagataacggcgaagatcgataattttatcaacgtgttcattcatgaccggacattgatcctcacagttgcggcaagtggtgcacgcccaaatctcctcttccgtgatgacctcgccgattaagctcgggttgtaatcaatggctgcggccgcttcacgcgatcctccccctgaggaagccgcggcgagctgattcgctttcgtgtgctgaaaaacgggcgcgggcacccacggagattttgacgtcacggcagcgcctttttccgtcaaatggtctctgagctttaaaatgaggtccatcggcgagagcatcttgcccgtaccggaggccggacacatatttgtacagcggccgcattcgacgcaggcgtaaaggtcgacaagctgagagcggcggaagtcttcaatctttccgacgccgtagctttctttcgtctcatcggtgaaatcgatttttttcagctttccttttgaatccagcctgctgaggaacacattcgccggacccgcaattaagtgcgcatgctttgattgcggcacgtacactaaaaagctgagcaaaaacaacagatgaagccaccatgaaacataaaacacggcggctgccgccggcgctgaaagaccgccgagcacaaacgcaatagaggaagcgatcggctccgtccaagacagagaatgatcgtgccataaaaggttcatggcgttcccgagaagcaccgtcaccatcagtccgccgataaacagcaggacaagccccgctttaaacccgcgtttcagtctgacgagtttttcaatgtagcgccggtaaaacgcccagactacggcgactaaaatcagaaacgtgacgatttcctgaaaaaaggtaaacgccggataaagcggaccgaacggcagatggcggtcaggaagcagccctttcagaataaaatcaattgcgccgaactgaacgagtataaaaccgtaaaaaaacagaacgtggatgatgccgctctttttatctttcagcagttttttttgtccgaacacattcacccatatcttctgaagacgttctttcaggcgtttatcaaattcttccctttggccgagcttaatataagcgatcctcgttctgatcaggtaaacgaataaataaacggcgtaagcggttacagctgaaaacagcagcgcgtttaccatgagaaatgcgttcatcttgtctccccctttgttctgatacccctcttcattgtcatatctttactttatcataaataatgaatgagtgttcagtcaataattaaattcacattctcagggcacactacgaatacttcggaaaggagcgtcggtatgaaggtcatttttgtgttgcttgtcatttttatcatattgatcgcacttatgctgcttgatatgctgcttggccgggcggcgtacaaaaaacaggcgtatgagcccgtttttgacccgaaaaagagtgatatcacactcattcactgcggcagcgagcttgtgcggcagatgacggctgatatccgccaagccgtctcttctattcatatgatgttttttattatgaagaacgatcaagtcagccatgagatgtttcatttattgaaggaaaaggcccaggccggcgtctccgtatatctgctgctcgattgggcgggcagccgccaagtgaaaaagccttccattcaaacgatgaaaaaagccggcgttcacgttcattttctaaataaaccggcatttccgtttctttttttcaggctgcaaaaacggaatcaccggaaagtgaccgtcattgacggcaaaatcggctatgtcggcggttttaatatcgctgaagagtacctcggcaaaaaagcgaagttcggaaactgggaggattatcacctgcggatgaccggcgaaggcacggcggatcttcagactctttttgtaagcgatctgaaacgaaacaccggaaaagcacccggatcacccggggtttatccggcattatccgaagggaatatctctcataggacatatgcatctgacggtttttcgcttgaatcgcattatgaaaactgcatccgtaaggcggagaaaaaaatcattatcggcacgccttattatgtaccgagcaaaaagcttcaggaagcgcttatttcagcctgccgaaaaggcgtcaaagtcatcttgatcgtgccgatgaagtcagaccacccgctcgttcgggaaacagcttttacctattatcccgagcttctgaaggccggctgcctcatctatcggtattatcaaggcttttatcatgtcaaagctttcattattgatgaccgcatcagcattatcggcacgccgaattttgataaacggagcctgttctggaatgaagaggtgaatgtcatcattcatgatgaagcctttacaaaggaagtgctttcaaccataaagcaggatatcgaaaaatccgagcttctcacattagaaaaagtgaaacagcgctccgtcagacagcttcctgcagaatggctgggaaaggccatatcttactttttataaaggagaaaccatatgctgttcagattcggattcgtcgcaaacgccatgtgcctttgggacgcgtcccccgcaaaaaccttaacatatgcgcgctataccaagctttcccgcagtgagcggaaagacgccctgctttctgtgacgaaagcaaatcttaccaatacactgcgcaccatccactatgtgatcagccacggcatcccgctgtacaggttctcaagctcgattgtgccgctcgccacccatccggatgtgctgtgggattttgtcacgccgtttcgccaggagtttcgtgagatcggcgggctggtcagaaaatatgacctcagaacgagctttcatccgaaccaattcacgctttttacaagcccgaaacaggagattaccgcaaatgcggtcaaggatatggcctatcattatgacatgctggacgcaatgggcatcgcggaccgttccgtcatcaacatccatgtcggaggcgcttacggtgacaaacaaagcgcgcttggccgtttccgcgtgaatctgaaagaacttcccgatgtcatcaaacagcggatgactttagaaaacgatgataaaacgtatacgtccgaggaaacactcagtgtatgtgaacaagaaggcattccgtttgtgtttgattatcaccatttttacgccaatccgatcgatgacgctgatttagatgacattcttccgcggatgatcaaaacatggcagcggatcggcttaaagccgaaggtccatctctcctcgccaaaatcagaatcagccatacgcagtcatgcggactatgtggatgcgaattttattctgccggtgctggagcggtttcgacaatgggatacggacatcgattttatgattgaggcgaaagagaaagaccgggcgctgctccggctcgtcgaagaattaagcgccatccggggagtcaaacgcctggcgggcggagtgctgaggtggaaggcataaccaggtttatcacccgtttatatggggaatttccgaaataacagaccatcagacggaggagaaaacatatgaaaaacattacatctttgaaaatagccgctaagaagttcactttaagaaacatgcttcagctttatcagctttgccacacggggggccacgagctgtatatctactctaaaaaaacaatgtgcaagatcaaagatatcattgagctggaaacgttcagaatggcccataaagaacaagaatatttaattgtagtggaaggaaagaaagcggtgcagcttgttgaccgtttcaaacatatcatcgaacctgcgcaaaaagaagcccattaaatacggactacataaaaaaaggatagacaggaggctgcccggcccccgctcgtctatcctttttcttttattaatgaatcagctcgccgaattgggcctgatgaagtctctggtacatgccgccggatgccagcagttccttatgatgaccttgttcagcgatgccttctttcgtgacgacgacgatcctgtccgcatccttaatcgtagccagccgatgggcgatcacaagcgtcgtgcgtccttcagacagctcttgcagcgatttttgaatggcggcttccgtttctgtatcgagggctgatgtagcctcgtctaaaattaagatcgacgggtttttcaaaaacattctggcgatggaaagccgctgcttctgcccgcctgacagtttcacgccgcgctcgccgatcaccgtgtttaaaccgtcgggatacccgtttaccaagtcctctaaatgcgcctggcggacggcctgccagatttcttcctcagacgcgtcgagccgcccgtaagcaatgttttcccgcaatgtgccggaaaacagaaagacatcctgctggacgacgccgatttgtccgcgcaatgatgacagcgtcatgtccttaatatcgattccgtcaatggaaatcacgccttcagacggctcataaaagcgcggcagcagacttgtcagcgttgattttcccgctcccgaaggcccgacgaatgcgactgtctccccggcatgaatggacaaattgattcccgacagaaccggactgttttcttcgtaaccgaatgacacaccatcataacggatattcccttttaaaccggacacatgtctcgcgttcggggcgtccttgatatcaggctccgtttccagtatttctataaagcttttaaaaccggcaatgcctctcggatacatctcaataatcgcgttgattttatcaatcggacggaacagaacgttcgccagcagcacaaaagcgacgaattccccgtaagataacgatccgcggatcacgaaccatgtgccgcacaataagacgaacagcgtgacgaatcttgtcagcatgtaactgatcgagccgtttttcgccatgattttatatgacgtcagctttgttttgcggaaacgctgattgttcacgtcaaaccgctgcgtttcaaacgcttcattgctgaaagcctgaacaagacggatgccgccgatattgttttcaaccctcgcgctgaagtctccgacgtctttgttcagttttgtaaacgcagaggtcatttttttattgaaatacaaagcaagccatatgacgaccggcataatgataaaagtcaacagcgcgagctgccagttaataaacagcatcacaccgaatgcgcccaaaatcgtcatgatcgcgataaacaggtcttcaggtccgtggtgggcggtttctccgatatacatcaaatcattggtgagcttggacattaaactgcccgttttgttgttatcgtaaaatttgaacgaaagcttttgcagatggtcgaaaagctttttccgcatatcggtttcaatgttaatgccgagcatatggccccaatacgtcacaacatactgaagtgccgagctgagggcgtagaccccgaataaagcagcggaagtcaaaataatcagactccaatcccgccccggaagcaatgtatcgataaagtaattgacaatcagaggaaaactcagctccatcaatccgccggcgatggcagaaaagaagtcgagaaaaaacagctttttgtacggtttataataagaaaaaaattgtcgcagcacgattccgtcctccttgtgcctcgttcttaatgataatatttctcaattatactatacacaaggagttttaaaagcgttttttataaaacgccggaaaataaccgtgcgaaggattccttcgttctttcccataatgtgcgcttatagaaacggacggggctgattttttcagactccttcatatcctccagataatgcgcttcaagatctttgatcgcctcttgatctgtaaaaaagacattgacttcaaagttcagctgaaagcttctcatgtccatattcgccgtcccgacagaggcgaggtttccgtcagtgatgagcaccttttgatgcataaagcctttttgataagaatagacttcgattccttcgcgaagaagctcggggaaatacgatctcgtcgcgtactgggttaaaaatccgtcattggtttccggcaccatgacacgcacccggacgcctctggcagcagcctcctttagcgctgtgcggatcggctcattcggcacgaaataaggcgtcgcgatccatacagacgattcggccgccgctatcatggcataatacagatcgctcatccgctccttcatatcggggcctgtcggaacgacttgatagacgccgccgctttctgccgaaaccgggcgggtatatgctttccgatcaatcagcacctcatccgaaacgtattcccaatcaagcataaaaatgctgtggagcgtctgaacgatttctccttcgactttcatatgggtgtcccgccaaaagccgacatcttggtctttgccgatatactccttgccgacattcagcccgccgacaaaaccgactttcccgtcaacgatgacgatcttgcggtgatttctgaaattgaatttttggttgaaaaaaccgtatttcagcggcagaaaagggacgatgttcacgcccgcgcgtttcagttttttaatatcttttccggccagcttcaggctgccggccgcgtcgaacaaaaaccgcacttccacaccttgacgcgccttttccatcataatgtccatcatcttgtgcccgagcatgtctgatttgaacatgtaatactcaatatgtataaatgacgcggcctcccggagcgcctcaaacagctccggaaatgtttcgtccccgtttttgagcaccttcagcctgctttttgtattgatattcatatgggacgctttgattgaatattgaaagaaacgcttctgatttcctttcagcccggtcaggtcgggagtttgttccatatcaaatatcgttctcagcttttcccggttgtatgtccgtttcgacctgaacagcttgcctttttcataaagctggccggaaaaaaggtaaaataagtacccggcgatcggaaaaaacacaagaatatgaatccataacagcgtgtgctgcgaggtgcggttttcaagaattaacgaataaatgctgaacaaaataatgcttgcataacaaagcacccctccgtaaaactcaagcctggaaaccggaaaaaaccatatgacatatgctccgataagcatcatatataaaaagcaaaattccagtctccttttcagcatcccgactctctcccatctgatccgatatctctgtataccctctgttttccggcttgtaaacatatgaaaaagcctctccgcacgagcggaaaggcttatgatgaagcttcctgtgattggccgggtgtgatgttctgaagcaatgccggattgagcgagcagctgcctttgattttatttttgaagatgccgatgatcagaccggtgaccgctatcgacactaaggagaagagccctttcagcaacccgacggaaaaaatgccggccagcacgacgccaaaatcgaagaggaaattaacggcacccggattccatccgcagcgcttttgcagaaataaagcgaggatattggcgccgccgagcgatgcctgatgataaaacatgagcgacaggccgaacccgatcagcgccccgccgcaaatcgccccggcaagcggtgaaacagagaccggcggcagccagtgatccgcgccggtaaacagagtcagtactgtgactgcaaaaacggtggatagagtgaatttgattcccattctgatgagagaaaatatataaaacgggatattgatcagaaagaagataatcgcaaaagaggaatgaaacaagtatgacaggcttagtgacagtcccgctgtgccgccggttaatacatgagaatgtctgagtgtcaggacgccggcgcttgtcatcagacaggcggctaaaatgaggaaaatccgcttcattcttcactctccttttgttgctgttatttccaaataaaacataacaggaatcccggccgcccagccattaccttggcagaaaatatcttatgtttttattttttcaccataaaaaatccccctcttgcaggggggatttttacgtgcgtttccgatagacaacatagctgcgggtcaaatacttgaggggcaggctgaacacgtgaaccaatcttgtaaacggccaaaggataaaaacgacgtaccctatgatgatatgaaacttaaaccatagcgggacactctccatcaaagaagcgtcaggccggaacaaaacaatttccctgaaccacggcccgactgttgccctgtaatcaaagcctttcgaatcaatgttaagaaatgtggccgcaacgcccgacagcatcatgaacagcagcagaataagcgtcaagatatccgatggcgagctggttttgcggattcttttgtcaaacagccttctgtacgtcaggatgacaagtccggcacatgcagcaatccccgccggcaggcctgcgccgatcgccattttgtgatacatatgctctgaaatgccaagggaagcatacacgccttccgggatcagaattcccatgacatgtccgccgacaacgcacagcagtccccaatgaaaaagtgtgctgccagcggcaagttttttcttttctaacagctcgcttgatttcgccgtccagccgaattggtcatgctgatagcggtaaatatgcccgccgataaagatcgtcaatacaatgtatggcataacgccccacaggatctgcccgctcatgcctgaacagccccttcttcaatgctttcatgtacaccgatgttttccagtgcggcctgcagcacgtgcagcagctcagcatagatgctgttatttttttcgaggcggaaagccagctccctcacattggacaggtatttctcaaacacgcttctcgccgcttcaatctccgcaactgcggcgaattccagcatcagcggcaggtaatctggcagttctttatctgtcggcaggaaaccggattgctggtaggtgttttttaaatgcagcaattcaatgccgcgttccctttgttcgcctgagttaaagtaggtgacgtacatattcgttttttttccgaaatcgaacgtatacacatagtgttcaatcagcgcttgcggagaaaagccggccgccgcctctaaaaagtgcagcaatttctcccggatttgctgattggtgatgtcatggataagagccttccaatcgggaatctcggctctccactcttcctccggatatgagagaagaacggaaagagcggagaacgtcatttgccggtctgtggtgttcatgttattacacctcatttatgaaaagttagaaacaagagcccgggccgcctgaaaatgataagccgcagctcccttgttcagcatataaatctgacacttcttctcgatggctgctcgggatcacaaaacggtcatcatatttggcgattgccagcagccgatacatgtcttcaatttgctgttctgttaagccgacactggagaccaatgccgggtcgatggatttatttgtctgaaccgccctcatatactggcgcatgacagacattttctttaacgtggaccgaatatgatccgtatcccccgccgttaacagctgcgccaaatagtcaatcggaattctcatttggtcgatagccggaaaaatcgcttccgccgtttgccggcttccttttccttcaaagagattcataatcgggctgagcggcggaatgtaccaaaccatcggcagcgtacggtactcagggtgaagcggcagcgcaatcttccagtcgatgatcattttatagatcggcgattgctgcgcagcctctatccattcagccgggatgccttgttcttttgccagtttggcaatctcaggatcattcggatcaagaaaaacgtccagttgggaatggtagagatccttttcattttcaacagaggccgcttcctccactttgtccgcgtcatacagcatgacgccgagatagcggattctgcccacacacgtttcagagcaaatagtcggcagccccgcctccaaacgcggaaagcagagtgtgcatttttccgctttgttcgtttgccagttaaaatagacttttttataaggacaggatgagacgcaatatctccatgaacggcatgcattttgatcaacaagcacaatgccgtcctcctcacgtttgtacatggcgccggacggacaggaggacacgcacgccggattaatgcagtgctcgcaaatacgcggcagatacatcataaagacttcatcaaattctgttttgatcgattcctccattttttgaacgtttggatcttcaagccctgtaatatggccgcccgcgagatcatcctcccagttcggaccccattcgatattcataaaatcccccgtcaaggacgatttcggccgtgccaccggctggtgttttttctgcgggctgtttgttaatgtttcataatcatagttccaaggttcatagtagtcatcaatcgtcggctggttcgggttatagaaaaggcctgcgagccgattcgttttcgggcctgatttcagttcaagctttccttttttcaacgtccagccgcctttatatttgtcctggtcctcccattgcttcgggtagccgatgcccggctttgtttctacattattgaagtacatatattccgcaccggaacggtttgtccacgtgtttttgcaggtgacgctgcacgtgtggcagccgatgcatttatccaagttcatgaccatcccgatttgcgctttaatcttcaagccaatcaacctccttcagcttgcggatgacgacattcagatcgcgctgattccccgtcggaccgtaatagttaaagccgtaactgagctgtgcatagcccccgatcatctgggtcggcttgacgtgaatccttgtcgggctgttatgggtgcctccgcggttattcgtcagttttgtgccgggcacattgatgtggcggtcctgggcatggtgcataaacgccattccttttggaatccggtgagacaaaaccgctctcgcgacgacaacgccgtttcggttgaagcattcaatccaatcgttgtctttgatatccgtatccgcagcatcatctttattcatccacacagtcggcccgccgcggaacagcgtcagcatcggcagagaatcaaaatacatgctgtggacggaccatttattatgcggcgtcaaataattaagaacgatttctttgccctcttgatcaggccgcttgcttaggaacggacggtgctggaggatcggtttaaatgtcgccatcgtttcaccgaattccatcatcagttcatgatcgacataataggattgtctgcctgtcagcgtccgccacggaattaatttttccacattcgtcgtaaacggcgagtacctgcgccctcctttttctgaaccggtaaaggccggagaggtgatgaccgttttcggctgggctgtaatttgctcgaacgtaaagcattcttcctcgcgctcttccgccaggtctttcagctccagattggtaatgttttcaagtgattcccatgctttcacggcgacttttccatttgaggtggacgacagggttaaaatcgcttccgccgcctgcttcgcttcacttatattcgggcatcctttggcaacgctgtttgaatcggtttctcccagtctctgtttgagtgattcatattcatccgcaatcgaccagctcatcccttttgttccgctcggttttaaagccgtattagggccaagcgcggtcattttatgaaaaatgtgtttgtaatcccgttcaacgacatggatgttcggcatcgtttttcccggaatggcttcacattcacccttgctccagtcattgattttgccgaacggctgggccaattcctgcatcgtgtcgtggaggagcggcgttgcgactacctctttcaccggctccatatcgacttcttccgccagatcggaaacggcttttgacagcgccttaaaaatatcccagtctgacttcgattcccacggcgccgagatggccggagcaaatggatgaataaacggatgcatatccgtactgctgagatcgtgtttttcataccatgtcgccgccggcagcacgatatcggaatacagcgccgtacccgccattcgaaaatcaagattgattaacaagtcgagcttgccttccggcgcctgctcccgccatttgatttcttcagggcggatgctgtcgctgtcgtcattcatcagaccgttcgtcgtccccagcagatgcttgagaaaatattcatgccctttccctgagcttgagatcagatttgcccgccatacgaagagatttcttgggaaattcacttcattgtcagggtcttcaatcgcgaatttcagttttttttcttgaagccgtgaggccacgtacgcacctacgtcttcaggtgtcgccgcccccgctttctcagcttctttgtacagatcaatgccgttttgattgaatgtcgggtaagacggaagccaccctaatcgcgccgccagcacattgtaatcggcgtgatgcttgtagcgggatgacgcggcgatcggtgaagccaagtcactgatcggctggtcttcataacgccactggtctgtcgcaaagtaaaaaaatgaggtgccgttttgcagtttaggcacgccttcccagtcctttgcggtggcaatcgtctgccacccttcagccggacggagcttttcctgccccacgtaatgggcccagcctccgccgtttacgccttgggcgcctacgagtaaaacaagatttaacaccgcacggtaaatcgtgtcggagttgaaccagtggttgatccccgcccctacgataaccatggatctgccgtctgtatcaattgcattttgggcaaactccctggcaatctgtataacggcttctcttttaattcccgtgatctgttcctgccaggcaggtgtgaacggacggggatcatcataggatgcggctgattgtccgccgatgccccggttcacgccgtagttggccaatatcaagtcaaacacggtcgtgacgtacgtctcttcaccgttcaggtccagttttttaataggaagatcccgctcaagcactttgtttccgtcatctgaaaaatacggaatgcgcactgagccgatttcgtcctctattccgagcacggagagacggggctcaatctgttccccggtgtcttcgtcgatcatgtgcagattccatttctgctgcccgtcccagcgggagcccattgtgccttgcggtatggcaaacgcacctgtctgttcattccagaccgccggcttccactgatcattttttctctgccgcccgatgtcttttgcatgcagaaaccgtcccgctgtatacacgccgttctcttttgaaagagtgacgaagaatggaaaatcggtgtattgcttcgcgtactcaataaaacgttcagtttcttggttcacgtaaaattcctgcaaaatgacgtgacccatcgccatcgcaagcgccccgtcagtcccctggcggatactcagccagtcatctgcgaactttgaggattccgcaaaatcgggactgatcgaaatgactttagcgcctttatagcgggcttccgccagaaaatgcgcatcaggcgttctcgttaacggaacgttggagccccatgtgataatatagcctgaattgtaccaatcactgctctccggaacgtccgtctggtcgccccaaatttgcggggacgccggcggaagatccgcataccagtcatagaaactgagcattgggccgccgattaacgacatgaatcgcgaacctgatgcgtggctgatcatggacatcgccgggatcggagaaaaaccgacattccggtcaggcccgtatttcatcactgtatacagcagagaggctgaaatcagcttcagcacctccggccattccgcgcggacaaagccgcctttccctcttgcctgtttataggacttcgctttttcagggttttcaacgatcgatttccaggcatccagcggattttgatgcgcctgcaatgcttcccgccacaaattgatcagcacaccgcgcacatatggatatttcacacggagcgggctgtagatgtaccaagaaaaactggccccccgcgggcagcctctcggttcgaaatcaggcatatccgggcctgttgatggataattcaagttttgtccttcccacgtgacaattccgtttttcacataaatattccagctgcaagaacccgtgcagttgacgccgtgggtggagcgaacgactttgtcgtactgccatctgtttctgtatacattctcccaatcacgatcttcgcttgtcgtttggctatggttatttgaatgatgttcgataggagaaaaatagtttaatctcctgagcaacggactcattttctttttcttcatgatcgttcactccttccgagtcaggtgatgctatgtacactataaacagagacggcgcgtttccttgtgaactatgtcacacactctgcttttttcacaaaacgttcacacagagcagcaggaaggatttcaaacgatatggggacgcccggcgtcataaaaaaaccggttctgtttaagaaccgggttcggcgttttcatcccgtgatgtatgcagataccgcaaaaacaactgataggaacagaagacattttgctgaagcatcgccaaaaagttcatttgcagccgcggatggtaagacatcatttgcttaaatacggaatatggaatatggagtaccaggatatccggtgaggcattgactgagataaaaggcgataaagagagcccgcctttttcatcaatcggaaacacatcgcctttttcccacagcgcaacggtttgcgacccttcagggagcctgctgtccgtaaaacggatattgccttttaatacaatataaacggattgtgaatgaagaaaggatggagattggccagatgagccgcggataaacgttccgtttttcagcaaggtttcgacaatggacagaggcacttcattaaacataggaagttgtttcagaaataataaatagtcacactgattcataggaaagcctcctgtgctaaggatagctttagtgtagcccgattgagcctgcacggcagtgatgtatttcacagcttgtatgataaaagtcacttatcaggagagtgtatgtacttataatgaaataaaaaggagggtttcgatgaaggcgatgattccgaagcagcacggcgcatgggcgatgctgctgattccatttttactcggcatggtcaagggtggcccggttttctggcatattccgctctttctgggctggctgttcctttacttgacggtttatcccgtttcgctcgctttgaaaaagaaacagcttcagccctatcaaaagtggatatggtattacggttttccggcctgctgctttttgatcatttctgtctatcataggccgcagctcgtctggatcggcgtttttttattgccgctgtttctcatacatacgcattatgcccgccgaaaaaacgaacgggcgctcacgaatgatattgcgggtgttctgttcttttgttcaggcgggcttgcgagctgctggctgggaacgggaatccttgacggctgggcctggtttctattcttgcaatccgctttattttttgtcgggagttctttttatgtgaaatcggtcatacgggagagaaaaaacagaacctttgcatactggtcatggggatatcacctcttgctcccctttttatcggcttttctcggggcaggctgggcgtttctcgcttttatcccaagcagtctgcgggcctggttttttcacggaagagactggccggtgaaaacgatcggcattctggaaatcataaatgccggcttctttttcgccgtcatgtgtatatgtatcacaagctgaaaaacaaggacaccggctgcccttgtttttttcagtcaatattgcagatctcaagcggacaattttcacactcgatctcgcatcgtaaatagtcccgcttgtgcaaaataatttttccggtttcgtctatcgaaataaccccttgtttgcggaggtctcccagcatgcggttgacgctctcccttgccgccgcgcaaaacttagccaaatcctgatttgtcagcacaatgttaatcagaatcccgtcgcttcgttccaccccgtagctgtttgataagcggataagggtggaatagagcgccccttttttgccgtgaagaagcaggtccctgatcttggactggatttttcgaagatgggtgctcatccatttcataaattcaaacgtcaaaacaccgttttggatcaattccttttccagcttgtttttattaatgacgagcacctcgccatcctctaacactttcgcactgagcatatatctcggctcatctgtgaatagcgtcaattccccgacaatatcgtttttttggcagattctaagcgtcaggtcttttccgtcagacgtcagcttgccgatttcaatgagtcctgattgaatcagataaagctcttttgcatccattccttcttgaaacaaataagtatgttttttcattttccttttcgtactgatcgattccagcaattcatgcagttcgcgggaaagaagttctttatcagattttcggacagagagaatattcatgagctcacctcgaagaaagtcacgttgcgtatgtatattgtaacgtgacttgatttgcactcacccagaaaaaactaacaatcttgtgaatggatcattatgaattgaggctctgactgtttctctccgtatgtgttttcattctttcctgccaatacatccagatcacaagaacaaagctggctaacgcgacctctgaaagcgccataaacccgatcgcgtattggcctgttgcctgaaatacacttgccagaatcagcggagggaaaaaaccgcccagtccgcccatggcagacacaattccgttggcaatccccgcttgcttcgaaaaatagaaaggcaccagtttaaataccgtcccgtttccaatccctgagcagactgccaccgtcagcgatccgaacgcataaaggccgatcgtcggggagaatgacagcatgacccctgacagcgtaagccctgcgaaaacgaacatcagaatgcggagcgggctcagtttatctgcaagaaaccctcccacaggcctgagcagcgtagagaccgcaataaagccggccgtccgcagaccggcgtccgcagggctcagcccaaaatgctcaaccaaaaaattcggaagatagatggtaaaggcgacaaaggcgccgaacgtaataaaataaaacaggctcaacatccacagcacatgatttcggtaaacggctttcatttgtgtctttatggaaactttgactttcttctcatgccggtcgccgaacaaaacgtgcagtaatgcgaaaacagccagcaaaacaagatacatctgcacggttgctttccatcccgcggcttgagcgataaccggcgccgcaaaggtagtaacggcggtcccgatgtttccggcaccgtaaatcccattgacgactccgtgcttttctttcggataatatttcgggagggacgtcactccgatggagaataccgctcccccgatccctaagaaaaagccgcccgcgattaaatcaaataaagaatccgcgatactgatccaaaatacaggaaacaaaagcaggatgaagctgatcataaacatcagccgcgccccgtacctgttcgttaaatatcctaaaggaatacggagaagcgatccgagaataacgggaatcgccgtcaccaatgaaatttcgcctttgcttaaatgaatatctgatgtcatttgagaaatgagcgatgaaatcagcacccacaccataaaccctgccactaagcttaatgactgcaacgataattgaatatgttgacgattgatcattcggcttgcccctttcactgattcaatatcagtcctatcatacaaaaactcagtgtgcgggattgtgaattacatcacacgctttatatacaaaaaagaacaaagcccgaagactttgtcctttgatcatcattacattttttccggagcggatacgccgatcagctgaagcgcattgttcagcgtaatttgcgtcgccttcattaaagcgagacgcgcgcggctcttctctttattttccggatcgatgactttctccgcattgtagaagctgtgcagagcggaagccagatcataaatatagtttgtgacacggtgaggaatgcgtttttccgccgcttctgccactgcctcagggaagccgccgatcgttttcagcaggtcatattctttttctgattgaatatggctgaaatcaagatctgccgccggtttaagtccctgctcctccccttggcgaagcatgctgcaaatacgtgcatgtgcgtattgtgcataatacacagggttttcgttagatgtggatacggcaagatccaagtcaaaatccatgtgcgtatcagcgctgcgcatcgcgaagaaataacgcacggcatccaagccgacttcttcaatcaagtcgcgcatcgttacggctttccccgtacgtttgctcatcttcattttttcgccgtttttgtataaatgaacgagctgaatgatctcaacttccaatgtgcctttcttgtaaccgagcgcttcaattgccgctttcatacgcggaatatacccgtggtgatccgcgccccatacattgatgagcttgtcgaatccgcggtcaagtttgtctttatggtatgcgatatccggcagcaaataagtgtatgagccgtcttttttgatcagcacacggtctttatcgtcgccgaacgatgtggagcggaaccatgtcgcgccgtcctcttcgtatacatggcccttttcgcgaagcgcctcaagcgcctgatcaatttttccgttttcgtacagtgacgtttcagaataccatacgtcaaacggtacgcggaaattttccaggtcggagcgaagtttatcaagctcgtactttaagccgtattcacggaaaaacgcctgacgttcgctctcctcttcgtgtacgaaacggtcgccgaaatcttcggcaagctttttcccgatggcgataatatcctcgccgcggtagccgtcttccggcatcggtttctcgagaccgagcgcttcaaaataacggacttcaacggaaagcgccaggttgttaatctggttgcccgcatcattaatatagtattcgcggctcacatcatagcccgctttagaaagcacgctgcacagcgcgtcacctaccgccgcgccgcgcgcatggcctaagtgaagatctcccgtcgggttggctgatacgaattcgacctgaatcttttcgccttgtccgatgtttgtctctccgtaatgttcacccgcttcaagcacggacggaatcagttttgttaagtagctgttgttcatgtaaaagttgataaagccgggtcccgcaatatccatcttttcaatggaagctttgcctttatcaaatgatgccacgatctcctcagcgatttggcgcggcgctttttttgcgattctcgccagctgcatcgccatgtttgtggaataatcaccgtgtgttttttctttcggcgtttctaacagtacgcttggaatctggctttcttccgccaggcccgctttcagaacggccgctttgatttcttccttcagcacgtccttcatttgttccgcaatgttcatgcgtgagttcctccctcatacgtgatcgtcatattatgtaaatgctgctgcccgtctccgacatgcatgtcatatgcgatgctgattcggcctttttcttcaccgagatcagattgaatcgattttgtgcttgtttccagctcaagctcaccaaatgacattttatatttcgcaattgtggaagctcccgttatgaaacgctgattcattttaacagcgcctgacctcatgatcaggacttcgccttcgctcaccttcacaatcgtttttactttgcctaggtcgtgttcttcataataagatagatacactttttgttgttttacatagtaaaatccggtagtacggaattcgatgacttcatcatttccgtcatcctcgatcacagacttcacatggagtgttatcggtgtctcttgcttcattttgacacgtccttttcatcattccactttgacttgaatagtataatcattcagcttgtaaacttcaactgcttctatcttaccatcattgctcattagatttgaagataaacctcataaaaagcagttccttatgagaagagaaaatcatatcactatgtcacccaatccgtaaaaaacatgacagcagcttttcagaaactcacacagtctcatcgaagctgctgcgacttccggcaacatagattgtgcagcagaaatgccaacgatgtcaaagcgctgcgtgacagctataaaaacgtccgccaaacacacgtgatggctgctgtattatgccaagtcatcatattcggctgcgtgttcgaaatcgtcaaagccgtccctttccgctttcacacgccccttgccgtatcaatgggactcgcggtgttactgattttgtatttattgtattttatgcggacgtacttgctgcagcttttccagcatgtcagcctgttcaaaaaagggcatgcgggagcgctgacaggagccggggtttggcggatgctcagtttcactgtaagtgaactgctgtttttaatcatcctggctgccatccagcagatcggctcatttatttataaacgatttttttatcgcagctctgcttctctcaacctgtgaaataagctacatcgcaatcgctgacggaccagtcccaaccggaatcaccgtcatggttgtataatcactcgtgcggtacacggttacggtattgtcgtcgggctgtgctgcatagatgtactgattatcaggtgttacggcgaggtcaaaggcgccgggcagagacacgtttgcaatgatcctctgtccagccgtattaactacgtataagttattaatgagaaacggttcactatatggctctagaaaataagccctagtgctatcgcgagaaaatacaatcgtcctcagcgtttcaaataaacggttgaagtcgcctcccctgcttaatggtgacaaactgatctccgttacacctttcggcagcagctcaccattcaacacatacgcaaaatttccagcgtaaggagtggcaattaaactgggaaattcaaatgtatctatgatactttctaccgactgcccagtatttacatcatatttatcaaccgaccaactgcttccattagcggtatagacatactgtccattcggatcaagagcaaagtctaaagcgccgggtatcagaatgacatcaatgaccgattgagaggccatgttgatcatatatatagatccggcggccatcacgtacgcgaactcatctgttgaatcaaattcaacctttctcggccctcctccaacagtgatggtatttatgatggttaatgttttattatctagcactgagacaaggttggtattcccatggaggacatacgtgaaagctttatcgaaagtaacgcctagattagttggcacgtcagaaaaagggattgtttttacaacagtgtttaaatctgaatcaataaccgaaaccgtgctgtctcctgaattggctgtaaacacatacgattgagggtctggcggtggcggtaaaacaagtgtcccggtcaccgtaagcggactgccgtagaaaggcggtacaatgagaagatcttccactgttatctgactgaaatcaggacagcggccagactgcgctgcataataaacaacttgatcaatctcttcagtatgaatcacagaaacagacccgtccccttgtccatattgatttcgtacaggcgacacactgacaagaagcgtaacggtcccttttactctcacggcatatcgaataccgatatcttctggttccggcccagtctggattaagcaaggctcactgatacataataaatgagcagtactccatgtaaccgtcgcagctgcttcggcagaatcaatggtgaacccctcgggaatgtcaatcggcacttgaaacggcgcttctctgctaatttcctcatcacaaaaacagaaacaattttcctgtaaagcagacagatcattctttttcatgaattcacgtccttttagaaatgtacagcatgcagttggttaaatcacaatatctcccggtgaaaccccaagagatatcacagtttccacagaataatcatccgtgttgtaaacagtgatgttctgctctaaaaaatgagcagcatacagaaattcgccattcggagtaaacgcaaagtctcttgccgattgcggaacatttcctataacgcctgcaccattcggactgacagcatataaattgccagtgaagctgtcatgtaaatacacctctgatccactcgtaaacattacatattggccatcaggctccagctcttgggtaatgctgaccgtaaacgtatttaagtcaataaccgtcaaataattgaataagaattcttgttctaagacatacgcataccgctccggccaatttgtttctatggatgatacgataagctctcgttcaatcgttcctgtgacttcaccggtgaataggtccactttttgcactaaaccaaaatcaagaacataggcgaataacccattgggatcaattgcaaaatcaaatccttccacaggaatcgacctatccacagttaacgtatcaattccaatcacataaatcgcagtatcgccgagaacataagcaaactcatgatttgggatgcattttaccgatccaggcggctgatccagcagtatggatgctgtcactgttaaagtgtcataatcgatgacagaaatcacattattgttgaagtgcaaaacaaacacagcacttttatccggagttatttcaatacctgtcggccggtacggtagagcaatcgttgtcacaacagtatgagtgtttgtattaatcacagaaactgattgatcatttggattcgctgtaaacgcataaacgggttccggctcaggagcaaacacaatcgtgcccgtcaccgataaaggactgccatagaatggcggaacgacaacaaggttctcgatcgtaatgtcactgacatccgggcaatcatcgggttcatcagaataatagacgacttggtcaatctctgcattgcggatgacagaaacagacccgttcccttgtccatattgatttcgcactggtgagacactgacgagaagcgtaacagttccctgcaggcgcactgcgaattgaacaccgatttcatcaggctctggccccgtctcaatgaaacagcgttcaatgacacaagaaaggctgtctgcattccacgtcacgtttgcaacagcttcagccggatcaacgacaaacccctcaggcaattcaatcggcgcttgaaacatcgcttcacggcttgcttcttcctcgcaaaaacataaacattcttcttgtgcggctcctgctttttctttaaaggaaagcttgttatttctcatatcttcacttccttttcagacatacactgctcacgcagatacaacagaatatgggaaggtgtatttgtttgcttgtacaaattgtggggataatagtggatttttgaaatgatatccgcagacatgcggttttaacgaaagaaaacattgcggtatttttgcgctatccttccgaatgaaaatgataaaatatgtcatatacataacgtggaagggagggattcggaatagtggcgagtgttttatcatcttcagcggttggagaaaaaatcaacgaatggtatatgtacattcgaaggttcagcatcccggacgccgagtacttgcggagagaaatcaaagaagaacttgcaggtctggaagatgatcaggatcttcatctatactattctctcatggaattccgccacaatctgatgctcgaatacctcgaaccgctggaatcgcagcggatagaagaacagccgagactatcagatctgctcgcggatattgataaaaagcaggcccggctgaccggacgtcttgattattattttaattttttccgggggatgtatgagctggaatgccgtgaatatctttcagcgattcagttttttaagaaagctgaatataagcttgattttgtcaaagattgtatcgagaaagctgaattttattttaagatgtcagagtcctactattatatgaaacagacttatttttctatggattatgcccggcaggcttataaaatttatcataagcaggaggcatataatataagggtgcttcagtgccattcattgttcgctaccaactttcttgacttaaagcaatatgatgaagcaattcagcattttaaaaaggcttatgccatggcagaggcagaacagcagcctcaattaatgggccggactctatataatatcggactttgttttaacagccaagaaaattacaaaccagccattgactacataaaacgggcaatagctgtttttgaagatgggaacatcatcacttctctcccgcaagcctatttcttaatcgcacaaatacattataaaatcggaaatatggccttagccagacaatatcatgacaaaggggtatcttatgcagaggaggcagaagattccctatatatcgccgagtatgaatttttggaatctttgtatgtcggtgagcctgatgaagaggcaatcatggaatgttttgactttctcagagataaatcgatgtatgctgatcttgaagattttgccttagatgtggcaaaatattatcatgaaagagaaaatttcgagaaggcttccgcatattttttaaaggtggaagaaacaagacagcagattcaaggaggtgtgaagttgtatgaaattgaagtataaattagcacttacttgcttggcaataagcactgtttttgtttcagccgacatcgcaagtgcaccaaaacatcaatttgaagttgctcagcgcggaatgatttaaatgatgattacttttaggcttgcaggttaaactgcaagccgttttttatataaacaactaatttgcaaaaacaaaaagtataccttaaaattcaaatgtgtaaaaagtatttgacacatatacatatattatttaaaataaatatatataaatttgaaagtttaaaataaaaacaaaaatttttaaggagggttttagtggataacaatattaaaaaacttagaacagcagctgatatttcacaaaatgatctggctaagctctgcaatgtgaccaggcaaaccatcaatgcaattgaaaataataaatatgacccgactttaagtctggctttttcgatagctcacgcattaaatacgggaatagataaagtattcaactataacgcccaaaaaaagtaagggagcggttcttatgaagaaaatggatgagatgcaaaaacaccaatcgggtatagccgccagaatagcatttagtttttatactgtcgctttactgatatggtcattaatagattattttaaaaacggaaatacaggatggcaatttccaatacttttaataggctgcgcgctctatttatggattcaagtttatcataatcgaaaaacaaggtaacaattccaatacacttccggaggattatacagcaatgtacgaatataagttcataaaagtagaagtaaaccgatggaaaggaaagcctaaagaagattataaagaaattattgaaaagtattcgcagcaaggatggaagctggttcaaatatttgctcctcctatttcaggttatggggcagccgattattttgatattattcttgaaaaaaaagtataaatgtttcagtacaaagaaagccggatcatacatatggtccggctttctttgtactgaaataagccagcagataccttaacggatttcacctcttaaatattttttcggaaatccgcaattcaaatagcttccaatatattttattatttaacttgctggggatattgaaaaaattggaggaaaaaatgagtctacttttaaaaacacaaaatagtaaagcgatttttacattagtagcatcaggaatcattgttctcgctcttttcagtataaaacataatcatttaagcatggatgtcatcgatattttaaacagagctggaataatagctcctagttggattgtcagtgctatcactgcaacgggttcagtcctggctatcattactgttttaggatctcttggtgcaggcttgccattagccgttttagaacaattggctgcagcaagtacagcagcagcttaatataaaacattaaattcaatatccctggcagtcccttaaacgaatggatgaaaatactttgtttaaaaagaacgttttagtcaaattgtacatactctgtctgatcttatttttaattgctttatttacagcatatttttatacagatcccgcttcaaatgtaaataatctaaatcgaaatatccgtccggatttttttcagattttctttaataatattaaagtagcgagtctgcttgtttttttaggaccgttgacgctgtcgcttggcacggttgctgttttaattattaatggattaattttagggaatgcgataggaaacatcaaagacaatttaaaccttttactgcttgttattccccatggaataattgaagtgccggtattgcttcttgcagcctctgtaggaatgaaattaactttggatttattactcctcaaaataaatttgaaattcacttttaaatatattggtattatatttctcggtttaatgatagcagctatgttagaaacatttattacacctatctttataaaaggagcctcttaagattatgcaaattgaattatcctcatttaaggaacgaaacattaattttttgtcctcgtttttgttttatattatcgggttagctttttatttaagttccctattgccttttatgaaaagtttaattcccaaaaacatccctatacaagttgttgagcaagtaaaacatttagattatatcattgcgatagccgcactgtttcttttaatgttcggggtgatttttgaaggatttgtattatttctcattataaattttcttggcgctcaaattaagattaaaaccttttattccctatttatgttttctaacatcccggtcgcaattaagttttttcttatatcattcaaaaacattttcgcagaacatccaaataccagtttatttttcacaagtaatcatttgattttttctatctttgatttgttcaatattgcatacttatttcttttgtttattcttctgaaatggagaacaaatttgaactacctgacaatctcagtttttatttttacggcattcctgtatagaatgtttttttagcatatataaataaaccccctcaataggggtttttctttcatttcgttcactgtatacagttccttttatatgcttccgaaacaataccgactctagtactcacattccactttttacagagaccggctatgatatattcgacattacgctgcgagtagtttaatgacttagcgatctctttattaggtttttcagcaattatcagtttaattactgaaatttcaatcttttttaattccaattcattttctactgctgttttcattctaacttcctttctaaagatgtatttactaaataataccctattatataatttttatcaataacatcaatgattaatggtaaaatattatgttgcttttactaacttctaagtagtttatatacaatataaaaatcccccgcatgtttcaagcgggggaaattcttttatttcacaaacccaagcagcatttcacgaatcatcttgcttgccgtgtttgcggtttgttctgagtggtcatagaccggcgcgacttctacgaggtcagcgccttttacgttgacttctgagcgcgcgatttcatggatggacgcgagcaattctttagacgtgatgcctcctgcgtcaaccgtgcccgttcccggcgcatgagcgggatcaagaacgtcgatatcgatggtgacataaacagggcgtcccgcaagctgcggcagcacttttttcagcggctcaagcacttcaaacttagaaatgtgcatgccgttttctttcgcccattcaaattcttccttcattccggaacggatgccgaatgaaaatacattttgcggcccgatgagctcggccgctttgcggatcggagtagagtgggaaagcggttcgccttcataatccgtgcgcaggtcggtgtgcgcgtcaaaatgaatgatggcaaggtccggaaacttcttatacatggcttttatgacaggccatgatacaaggtgctcccctcccatgccgagcgggaactttcctttttctaaaatgctgtccacgtattcttcaatcatatcaaggcttctttgcggattgccgaacggaagcggaatatcgccggcgtcaaagaaattcaaatcagccaagtcacggtcgagatacgggctgtattcttcaagaccgatagacacctcgcggattctccccgggccgaaacgcgaacccggacggtagctgaccgtccaatccatcggcatgccgtaaaggatggcgtccgcctctttccagtcggggcggcttgcgataaatacttttcctgaatatgcttcatcaaacctcatgataaaaccctcgctttcctgtaaaaaagcgcaagattcgctcctgcgccgtacgtttttatttgattaagtcgctcacaaatttcggaagaacaaatgccgctttgtgaagctctttcgtgtaatatttcgtgtcgatgtcaaagaaacggctgtcctccacttcaagcggatcgtactttttagaaccgatcgtaaatgtccacaggccgctcgggtacgtcgggatattagccgtatacaggcgggtgatcgggaagatttctttcacgtcacgctgaacgtttgtaatcagttccggtgtaaaccacgggttgtccgtctgcgcgacgaagatgccgtcttcttttaacgccttggaaattccggcatagaagccttttgagaacagattgacggccggtccgaccggttctgttgaatcaaccatgatgacatcatactcattctctgatttcgcgatgtgcatgaaaccgtcatcgactctcacgtcgacgcgcggatcatcaagcttgcccgcaatggacggaaggaattttttagagtattcaataaccttgccgtcaatgtcgacaagcgtcgctttttttacgcttgggtgcttcagaatctctctgatgacaccgccgtctccgccgccgacaacgaggacgttttccggattcgggtgcgtaaataacggtacgtgcgcaaccatttcatgatagacgaattcatctttttcagaagtcatgaccattccgtctaagaacagcatgttgccgaattcttctgtctccaccatttccagatgctgaaattccgtctgttccgtatataatgtttgtttcacctttaatgtaatgccgaaattcttcgtctgcttctccgtataccaaagctcgctcaattgtcatctccctttcaaggcttatttcatttattgtaagcgtctgtatcgcttttattccggttaaaatctcattttcacctaaggaaaaagtatagaggatggaggggaaaaagtaaagaagtgtccggtttgatatgtttaaaaaacccccttttttcacataataatagaatcatgaaaaagggggttcccaaaagtggataaagtatctggaaaacagctcagaatcacgttcaaaatcatccgcgcctgcatctttctgacactgatcggcggaatgctggccggcgtctgcttcacatccgttcttcttgcagcgaaatggcagggggccccctccgtccgggttcctcagtctacgattctttatgcaaatgacggctcaaagctaggtgagaccgattttggggaaaagcgctactgggtccggttaaaagatatcaatccgatagcggtgcaggccgccatagcggtggaggatcaaaacttttacaatcaccacggttttgattaccggcggatggccgccgccgcgctggctgacataaaggcaatggccaaggttcagggcgcaagcaccatcacccagcaatacgcgagaaatctctaccttgagcatgataagacatggaaacgtaaatggaatgaagccttttacacgatccgccttgaacagaactattctaaaaacgagattttagaaggttatgtaaatacgatatattacggccacggcgcatatggaattgaagccgcctcgcgcctgtattttggcaaacacgccaaagatctgaacgatgcggaagccgtgctcttggcgggcataccgaaaggcccgtccggctattcgccatatgtcagcgaaaagaaggccaaacagcgccaggaaaccattctccgactgatgatcggccaaaaaatgatctcaaaagaaaaggcggaaaggcttaagaaaacgccgcttgcctatcagccgctgaaaaacagaaccgcggcgaaaacggcgccttatttttacgatgatgcgatgaaagaactcgagaaaaagctcggcatgacgcgcgaacagctcgcaacgagcggattgcgtgtttatacgacgcttgataagcgcatgcagcggattgcggaaaacactgtggcacatacgatccgtaccggctctgacattcaggtcggcttttccgcgattgatccggcaacagggcgcgtgcttgcgcttctcggcggacgtgactacgaaaaaagcccgtttgaccgggcgacacaggcgaaacggcagccggcttccacgatcaagccgcttttgtactacaaagcgattcaaagcggctttacaccggtcacgctgatgaaaagcgaagccacagagttccagattgacgacaacggaaatacttattctccaagcaattacaacggctactatgccaataaaccgattacgctgcttcaggcgcttgcgttatcagacaacatttatgccgtgaagactcatctctttctcggcatgaataagctcgtgtcggcggcaaaggaattcggcatcagcgaacatttaaagccccttccgtctctggcgctcggaactgaacccgtgcgcccgattgagatggttaatgcctatgcgatgctcgcaaacgggggaaaacaaatcaccccttcctttatcacaaaagtgacggataccgccggcaacgtcttgtatgaacagccgcgcggacatcagcagacgcttgataaaaaagccgcttttgtgacggcgagcatgatgacgggcatgtttgatcaggatttaaacggctatacttccgtcacgggacgcaccatttctgaccggctgacccgaacctatggcggtaaatcaggcacgaccagcgcagacagctggatgatcggctttaacccggctcttgccgccggtgtatggacaggctatgacaaaagcagcacgattgattcagtagaagaaaaaagctatgcgaagacgatttgggcggactttatggagaaggcgctcgaaggagaaccggaaatagcgcttaaaccgccgaagggcgtcacgggcgtctatatcgatcccgcttccggctacacttcgggacccggctgcgccgcaaagcattatacgtatttcatcgcaggcactgagcccgcggatgtgtgctacggatcggaaccttctaaaaaagaaaaggaacacgcccccgcccgcaaagaagctccgcgcaaaaagtggtgggataagtggctcggcaaaaaagactgagcccggtgcattgcgcgccgggcttttaatccgcgtcttcctcaagcacccatgggagcaagagtgaaaagtcgagatggataatagggtcaggaaaacccttcggtataaaaaatgttgtactcggcaatgaaaacgaaaagcggatatctcccgccctctcgatatgaaacttcggccagccttccctaagcctgccgacaatcggatagctgcccgcataatgatgcaggccgttttcctttccatgctcccccaagtcgtgacagacagccggacgaatcccaaactgcgtaaacaatcttgttttctcggcgggaaggagattcaccgcctcggaaaagttccggcagctcccgcaatcgcaaggatcaggccatgatttttcgtattgttttctcgtttccgccgcatctgcttcaatgacccatggcccgatttcaaagacggtgaacatgatgaaacctccgcgtaaacatgaaaaaccccgagtcttggttcggctcgggactttccatgtcctgattctgtatcaacagtttactcagtacaatcgcaaaatagtgcaaatatttataaagttcacaaaaagttcacaaattatttttcttccggaagcagacctgttttcaattcatctgatgaacgttcccagagcccttggtcatgtttctgcagaaattcagcaagcacctgctttgagctggcgtccattttgtccacgataatgcagcgcttcattgatttatccattaaattcacatgctccggcaatgacttatagcctctgcggatacttctgtccacggtcatttcacaagccgtcacacccgcgtaataagggccttcttcttttctgtcgatggtgacccacacgagccagtacggttttccgttcggcacttcatctttgttcggcaggaatttgatgcctttttcaacgacactgcgggcatgcatggcgccgatgtcaacgaaggcttccttctcttccacatcgacaaataccggagaaatattgtcaaggctcagcgccccggcgccaaaaccgccatgtccgtcggtcggatcacttttaataatattaaatccgattgttttcttctttttttcttccatgaaaataccctcctacaaaagcggttgaaatataatggcaaataccttgagaatccagtctctcccctcgcttaacagcggccacacgacataggagccgaccggtgtcacaaacagcacgagaaacacgataatcccgtagctctcaaactgagtcattttggcgcgcacccgcggcggcacgagatcctcaataatccggtagccgtcaagcggaggaagcggcagcaggttgaataaacacagcgcgagattcagctgaatccaaatagagaaaaagcggtcaagccccatgctgaatgcagaaagcagctccattccgtaagcatgcatcaacactagcaaaaagaaaccgataaaggcaagaagcaggttgcttacaggcccggcgacggaaaccagcactcccgccagccgcggtcttttaaaggcgcggcggttcaccggcaccggacgggcccagccgaaacccgcgaccaaaattagaatcgttccgaaaacatcaagatgtttaatcggattgagcgttaatctgccctgtctcgccgcggtatcgtctccgaaccgatacgcgacatacgcgtgcgccagttcatgcatcgtaaatgccacgatcagcgtaatcacgacatagggcataagctccagcggataatataaaaatctgtccaaatgtaaaaatccccttttttaaaaaatgcaagattgtccttcattcagtatactataagtgacctctcttccaaagagaggaaacgataaaggaggatcagcaccatgccgctcgtaaccgttaaaatgcttgaaggccgcacagatgaacaaaaacggaatctggttgaaaaagtgacagaagccgtaaaagaaacgacaggcgcagccgaagaaaagatcattgtcatgattgatgaaatgagaaaggatcattacgccgtcgccggcaaacggatcagcgatacggagtaatccttgataatggccggcgctgctatgtcaggccggcttatttcattactttttcaacgaggctgaaaaaggtattcttttcttcttctgtcaatgcttcgaacagctcgtcaatgagcatctgccggttttcaatcatttgcatggccgccatttttcccgattcggaaagcgtcatccataccgtgcgtcggtcttcgttatttctcgacctttccacgaaaccctctttttctaaatgattcagagcggttgtcgtggctgaaggcgataatgtaacttcctgcaatatatctttaatcgtgcacgtgccgtgccggtaaataatcctgagaataaatcctctgatattgtttatactcttcggaattgtcgcctcatcaagctttttcgtgctctttaaatatttcgtgagcgcgtaatccagtacatttgcttgcaatatatcgtactccatgcagaaactccccatttcaagatgcatccatcatcatttgattgttttttattacattttactgatacctcgcggggaaagtcaaaatttcggccggaaagcccgcaacttttatcctgccctatacagactattatctcctgcttttttacccatcccttttatgcaatgctggttttatagacatgattcaggtaaaatcattaagggtgactgcgtttgacggaaaggataatctgatcggatgcggcagacaatatgactggaaaagaaacggaacagacggggaaacagaacacaggattgtcgattacacagaagatgtgacacgggtaaaagccaaagagcccctcttggcttttgcttttggatggagggatgcgtgttgcggaatatcctacaaaaaaaagacatcacccagctgcttgaacaaagcagaaacaggcagactgccaaaacgatgggtggatttgatttaactttactgggcatcggcgccgtcatcgggacgggcgtcatggttcttacaggcattacggccgcgaaaaacgccggaccttccgtaatcttttcttttatcattgcagccgttgtctgcagccttgcagcattatgttacgccgaaatcgcttctgttctcccggtttacggaagcgcctatatttactcttataccaccatgggagaaattgtcggccatttaatgggctggacgctcttatccgtttatatggtgacggcgtcggcggtggcaagcggctggtcaagttattttaataatctgttagccgaaatcggcatgcctttgccggacagtctgctgcacgtgccgagccaggggggcatcgtcaaccttcctgccatcatcattactctattaattgccgtcgttctgtcacgcggctccaaagagagcaaaacctttaataatataatggttctcgtaaaaatcggaattgttttgctgtttatcatcacaggaagcttttttgtaaagccgggcaattggcatccttttatgccttttggaatcaaaggcgtcattacgggggcttctgccgtcttttttgcgtttctcggatttgacgcgatttccgcttcggctgaagaagtcaaaaaaccgcagcgcaacctgccgatcggtattatcggttcactggtgatctgtacattggtatacgtcatcgtctgtctcgtcatgacggggatggttccgtattcacagcttaatgtgccggaagccatgtcttatgtgctgcagtctgtcggacaaaacgcggtggcgggcgttatcgctgccggtgcggtgatcggactgatggccgtcgttctcgcccatacctatgcggcgacccgtatatcttttgcgatggcaagagacggaatgctgccgaaagtctttaccattgtcggaaagaaatcgggagcgccgatctttaatacgtggctgatcggactgatcagcgcctgcatcgcgggttttgttgatctgaaagagctgtcagatctctcaaacatcggcgcattattgacattcgccatggtcagtctgtccgtgctgattctgcgccgcacccataaggatctgccacggggatttaaagtgccttttgtacccgtactgccgattttggccattatctgctgtttgtttttaatggtcaatctgccgctgaaaacgtggctttattttgccgtctggctgatcatcggcgtgatcgtttactttttatattcgtacaagcacagcaaattgagacaataaacaaaaccaggcccgctttatgtgcggcctggttttttcatcaaaaaagacgaaagccatcgcctttaacaaatgtgtttcagctcttctatgtagtgaagcgcctcatcatattcttcatccgtatatttctgtttgctttttatcgtaaacactttctctttcttttcctcagcttcaaggccgtcaaaatacaaaatcgtagacaccagctccaaaaaccgggatgagcggctgttgacgctgtcgatgtacttcttcatatccggcatcgtaagctccgcatgatgtaaaaactcggctcccgtctccgtcagcgagtaccggtattgaaagtagccgccctttttttccttcacctcatccagaaacccaagattgcacagctcttcaattcgaagcgtcagttcttcggaatacgggccgtaaaaatgaaaatcatatttttcgtagaaaggatactgcattttcttcgcgatataaatgattttctgcagctttttccgcccgatgatttctccagaatccgagaacaccttcatcagttttgcatgttctttcaacaaattcccgacatctccttttccttctttaccaaaatccttctatgtcagtcccagcagctgccggatttttaattttgcttcagggttttctgaatcgtcacaaatgaggtccatcggatagtagagcttatggtccgtccggcgtttgcccgaaatggattcgacaatggcggactgcctggacagctctttgatctggcccttctgcgttaacaggtgaatcggcagacgctcctcctcttcacccggccggtaaaaatcatacggcagatccgatgaagaatcgaccactaaatagtaattgggatcaattcccgcctctttaaacagagcggtcagttcaaaataagccgacatttcctcattggggttaaattcggcatattgaaacagctggcggttaatgaagcggcggcacaagtcggacagaatcgggtcctcttcttcttcccaagcctggaaataatataaaatgatggcttcatcaagtttcagataatccgcaagcgtcagcttcccttcaaaaatggaataaaaatgaacgggagcatgagtgaagatatacccttcttcatggagctgctttgcacggtggagaattttcgtcaatatgacttcagcgcttctcgtcacgggatgaaaatacacctgccagtacatttgatagcggctcataatatagtcttcgacggcgtgcatgccgctttgcttaatgacgatttggtcctctcgcggacgcatcacccttaaaatccgttccatatcaaaatgtccgtagctgacgcccgtatagtatgcgtcccgctgaaggtaatccatcctgtcggcgtcaatctggctcgaaatcaagctgaccacctgtttgtttttgtatgttttggcaatgacttcggcaacatcctgcggaaatcccggtcccgcctttctgagaacctgattcacctcggtgtcgccgagaatgatttccctcgtatagtcttcatgatccagatgaaaaaccttttcaaaggaatgcgaaaacggcccatgtcccaaatcgtgcaaaagcgcagcgctgagacagagttcgcgttcattgtcatcccattcaggacgccctttaaaaacatcatcaaccattcgtctgacaatctcatagacgccgagagaatggttaaaacggctgtgttccgcgccgtgaaacgtcaaatacgtcgtaccgagctgtttgatccggcgcagccgctgaaattcacgggtgccgatcaaatcccagatcagcttgtcccgcacatgaacatagcggtgaacgggatctttaaacactttttcttctgataattttccgtttggatacgccatcgtcattccctcttttttttagccgtgattctattatatcggctctgtaatttgaaaacatccttgaatttgtccggcgttttgttccagttttccgacattgattttttgaagcaaaaaagcctgacccatcgggcgaggctgtcgtaaaatacacatttactttttgatcttctttttcactttctcaatcagctcgtcctcagtcggcgccgacagcgggcggttgtttacgaaagcaaacgattttttgcgtccgggcccgcaatatgactgacatccgacctccacttttgcatccgggtcagcttctttcaaacgcggcagcaaagtcttaatattggtggcctggcaatcatcacacactcggaattcattagccatgatgtacgcttcccttcattcaatgttcctctatgttaaaacttaattttaaaaacgaaaaaaatcacatcacatctcattgtacaaggattcatcttatcctgcaaggctctgcgtatctctcattctttcagccaatttgtataaatattttccaatctggacattctaataccatcaaagatattgggggttgagaacattgacaaaacaaagacaggacgcctggtcggaggaaaacgacctgctgcttgcggaaaccgtgctccggcacgtccgggaaggaagcacgcagctgaacgcctttgaagaggtaggcgataaattaaacagaacgtcggcagcgtgcggattcaggtggaatgccgtcgtgcgccatcaatacgaaaaagcgcttcagctcgccaaaaaacagcggaaacagcggatgcgcgcgctcggaaacggccagccggccaagaagaaactattatatcagccgcctgcgccggatgcggacatcatgcaggaaaccgcagccgaagagacggttcaaacggaagcgccaaaagaggatcggcaagccgtcatgtccggcgaacatatgccttatgtcgatgaaagcttcaaggaagagttagctagtttatcacatttgctggcgcctcagcagccgagccaaaaggcggagctcacaatggcagacgtcattcaatttctgaagagctatgaaggcagcggaaagcaaacttccgccctgcaaatggaaaatgaccgtttaaaacgggaaaaccaagaacttcagtctaaaaccgagcagctggaagcggccgtcgaaaagcttgaaaaagatcaaaaaaccattcaggaagactacgaaaccttggtgaaaattatgaacagagccagaaaactagttttatttgaagacgacgaacatgcctctccgtccttcaaaatggaccggaacggcaatttagaaaaaatggccgaataacggaaaaacccctttccttgtcatggaaaaaggggtttttgccatttgtcaatgacgcgcatcctgatctatattaatgtaaacattgttcaggaggccttcttcccgcaagggctgcgcatctcggtccccgcccgcacataagcataaagattcaattcctcatcccaaatggttcttgggaattattgatcgattagctactgtgcaatacactgtatatagaatacaattattagatatgatgggaatgatagtaaatgagtagccaattacgaaaaggagcgttggaactttgtgtgttgtccctgcttctttatgaagatttatatggttatgaattaatcaagatcataagtgaaacgttccctgtatcggagggcaccatctaccccatattacgaagactcacaaaaaataactacctaaaaacgtatacagcagcttccgatcaaggcccatcacgcaaatattacaaagtaacagaagaaggcgccttatatcatcaaacattaaaatcggaatggcttgacctgtccgaaaaagtgaacagcatcattaaggagggaaaatgaatgtgtaaagaccaatatttaaaacatctccggcgggaaataaaagatctgccggaacttgagcaaaaagagatactcgccgatatcggcgaaatattccaaatgggcggcgctgaaggaaaaagcgatgaacaaatcgccgacaatttaggaaaccccaaaacacttgcgcgcgccttaaaagcggatattttcattagtgatgccgaggagcagaaaacatggcgctcctttttcaaagcattcggcctgatgctggggatgggcatgttcaacttcatgtttatgctgacaccgtttctttttgcctctgttgcggtgttaagtttgatggcgatcggcctgatgctgatgaccggatcattctttctcctcgtaaaagtgccgattgcaacagccatttttaacggatgtatggttcttggagcgggtatggcggtgtttatggccggatttgatctttcgaaactgatattccgcatctttttgcgctatttcaaatggaatgtcagcgttgtaaggagggaaaccattgaatcgaaaaatgtggtatagcattgctctcattttaatcgttgccggcctgatcggaagcatgttcttcggttttgacggcttttaccctaaatcataaggaaggtgtgcaaatatcatgactgaaccagccctgatattaaaagatgtctctaaaacaatcaatcatacccctattgtacagtcaatttctttcgatgtgagaaaaggcgagattttcggccttttagggccgaacggctcaggaaaaaccactattttcagaatgatcgtacagcttattaaaaaaacagaaggagccatttcattcagaggcagaccggacagcgactttgaatattttatgagacatatcggggttatcattgaaggcccggatatgtatccgaatatgaccgctttgcaaaacctaaaatattttactaaactgcgcagcacctcgctgcgaacggatgaccttatgaatacccttgcaaaagtcgggctagagcaggctgcccgcaaaaaagtgaaacatttctcattaggtatgaaacagcgcttggggctcgcttattctcttcttcacaatcccggattattaattctggatgaaccgatgaacggcctcgatcctaaaggaatgaaagaattgcgcaccattctttccgatttagcgaagcaaggggtttccattttattatcaagccatttattgtcggaaatggaggagatttgcgatagggttgcctatattaaaaagggacggattttaggaattgaagacatgaagaacagacatgaccttggtcagaaaaaactgtttaccgtcacggtagatcatccggcaagggcgaaagaaatattagagcaggacggtattcttcaagtacagcaaaaagacagccgcatcattgaattggaagcggaagaagataccatcccgtatgtcattaaatctttggcagagaaagagattctgatttcccgcgtttctgcaagaactttatcattggaagagaaatacatgatgattacagatcaggaggacgcggtatgagcatatttcatctggcgcagaacgaattcataaaaataacccgaaaaaaaggcacacttttatctctttttttcctgtttctcatcgttttgctggccggccttattatgaatcatgagttagatgcttcctcggataacaattggaaagaacggcttctcgccgaaaaaaaacaggaagaaattgataaacccgctgaaacgacaggcgtttattattctgctgatgttaagaataaagactattatttggagcataacatcaacccctatgaatggaacggctggaggtttttcggcacggttacttcaaacgggcttgagattttcgtaagcttaaccgcgattttaaccgtcagcgggattgtttctaaagagtttgcccttggaacgattaagtttatcgctacaagcccgaaccgaagatggcggattttaacatcgaaatttctggcctcccttctgtttaccggtatgatttacttattttactgtgtgagctgtttgctgatcggcggcgtgttattcggtttttccaatgcttcatatccgctcgtctatactcatttaaatgacagtctgtataccatcagttcaatcaaagcatccggaatcattctgcttttgcgtttcatatcaattataagcattgtcaccattgcgttcactttgtcagtattgtgcaaaagccaggcgctctccctttgcttatcgattttactgctgtttgccggcagtatattgggcggaactgatttgcttgcccaatttacgtggtataaatttacgctctttccgcatttaaatctcgttgcttatgtaaataaaagtgcgggtgatgcgatttcaacgttaaacatcccctattccatgacggttatagcgatctactttcttatttgtttattgatttctttttccgtctttcaaaagagagacattacagcatagacagagaggcggcggcataatgagcggacggcaggaaatattgacggtccagcaatttgccgctgaccgccccttggtccatcgctaatggattcaaataaccgaagctcccgctgcttcgctgctgaaagcgtagaaattcccgcccttcccgtataaaaagcgcctcatcgaattggagaaatttcataatggctgtgtattttgcaacggcgtcaatgtgatactttctgcactcggctaacattaaacctgaaaaagcaaagtctgatgttttgtaccattccgtgagaaaaggctgcaattctttcatttgcaaataagtgacggcataaagggcatccgcctgttcttcctgcatgccgcccggtgccatgagcaaatcggcctcacgtttcatcccggtttctaagaacacgatcagttcttccggagtcaccgccccaaaataagctcctaacaccatgaggatcatagaggacggctctgatttcagttcctcttgtaaaccgcggaccatttgttcaagtccgttatgaaaaaagatgctttttgcggcatctatcctgcggtacacatgatacgcatacgcgaacaggaccggatggcattcgtgcgttttttctccaaaataacgatctaagaatagaatgacttcttctgtatcctttcttttttcaaagtgatgacatgccgctaaaccgcaaaacaggtgcatgagatcatctgcttccatttcttccggctgcagctgaatgttcttccaaaaacccagcagccattcttctgttttttttatattaaaatgttccttgactatctgcatgttccacactccagattcagaatctcaatcgccggcagaagagccggagcacaatgaatggatggattctcgttatttatatgatgaagagccgcttgacagccataaaaaaatggatcgatacacgattggataaataacatattgcacagctgtttcatttttcggctgccgagacaaaacacaagccatttttgaatggacgccttcaagccgggatgaagcagatgctctccctcattcaaatgaagaagacagtactcgacaaactccagctcgttttcagctgttcttttccatgcgtcatggagcaaaggctgaaacatcgaattcttgtaaaagcgcactttttcatggtcagttgacattcccagctcgctcagcaaaccgacgaattcggcgtatttaaaataaggccattctttttttataagatagccgttttgcaatccgtgacgtatgacctgatcatccgaatccattccctgcttctttttataagcttttgccgttaaatagatatgaatcaactcattgacaatggccgtgttacagtgaaacagatcttcccagcatgacttatcaacgaaagcggaggcaatcctttcagtatgttcttttacagcggaagaatggctcgtcttcctgtagtacttgcagaagccggcaaacagctgaatgctcttttgatccggaagcgattgttcagcaaaagataataaaaattgatctgtctcttcagctaatctattcaagttaatcgttcctttctgctctaagacaggcatgcgcggcaccagcggcgacaagtgttgtatgatagcaatgtttgaacacatcttctcttcgctgttcacctgtcaaaccgggtttatgttgataggtgatgctcgggacattcccctctttcattcggccctgatagattttattccaggctgcttcatagagcggtttatggttgtccttatccatgttgatatgtaaaaaagagctgcacatcaataattcactggtaatatctaaattctcaagacagatatagatcccgagaaatttcaggaccttttcttttaaggacggcagatgatactctttatccgtaagcgaagaacatcccatgtctgttatataaaaaatcgtatgagtgatgctgtacgcatcatgatccgtcatatatgtatttgggatatcctgaccagctgctgtgtagtgatataagtcagaaaaatccgttatttccgaggttacacctgctctttgcagactgtacttcagatccattttccgaaagggaactttagcaaggctgcaatcaaaacgcgctgccgtgaatttttccagctcccatatcaccgaagcccgtgacggatgatcagtcaaggtaagaaattcacccgcaatagccaatccggcgagaccgtccggatcaaaatgaataaattcttcaagctgatcattacggagcctttctgtaataaactccgttataacagcaacttccttatcatctgcctgatttctgatcaggtaattggtaagaaaaatgagttctataaatgttttaaggcgccatctgaaatcattcgctactttatgattcatatcaaaataatggatatttttaacaatccatgacagtgctccccgcttaatttctcttatatactcttgtgtcaaactctcaccgcctcgtctcagatgtgtaggctccaaacagtgattatcctacttttgagcggctaaatcagagaaattcaaattcgggttttgattgtcttcttggctcggcactacaagcacccagccgctccaagcgaaagaattgcctgattgttccgcatctccggctaacaaatgtgtcgggatcgtgattcttttttcttcttttatttttttaaagttcatatctccatctccttcagtttatagaattatttggaacctacataaatatattaatcaaataaggtatataatgtaaactagttttgatataacgattctttttcactataactaaatagtatataattaccaaaaacaaaaaagcccggacttagtccaagctttcctgcgtgccgaacaccttctcattccgttccagcattcgggtcagatttttttcaaataccatttcctcttccggcgataatccggctgcatacaggcgtccgctgagttccttcagttcagtcaaaagcgccagcattaagtcttgcacggtaatgtccgtttgcagcaattcgcttaatgaagccatcgtttcgggccggatatcgggatatacgccttttgtatcgttgcttttgtcttttaaagcggcttgatagaaacgtctgatcagatcggcgcgttcgcttccgcttttatcggcgcaaaggtaaatctgaaccgcggttccgccccgcaggcgtctttgtgagattcccgcgaattttcgtccgccgatgctgagatcatagctgcccggacagtacgatcctttaatttcatatgcttcaatttcggcatggtgcggacgcagcatccgccgcaccagctctgtcatcgcctcgtagcctctgtcgatgtcgatgccttttttttcgtcttcaaaaataagggagatattcaatacgccttcgtccagtacgacggcgaggcctccggaattgcggacaatgacacggtagccttcgtcctccagcaatttcacgccgtcctctaaaaacggcaggcgcgtgtcctgaatgccgagcacgatcgtccggtggtgcacccaagagcgtgccgtcgcaggcgattcccctttgcctacggaggcgcacagcgtatcatccattgcgaatgactgcttcgcatcaaaataagggccgaggctggattggtcaatgattctccagctcggctgcatcagtaaatcaatcggttgctttcccatctatattaaatccctttcgtcataggctttccatgcatttattatatcactccgcttgtgatgattgaaattggcttttcaaaagagcgatgaagatttctttgttttttgtgttctccataatggaagattggatgatagacagtttccgttttaaggagaatccttttatctcaagcacggaaatgctgccgtgaagcagatccttttgcagcacgctttttgacagtacggaaagacccattccgctgatcacggcttccttgacgccctggttgctgctgatcgtcatcatggatttcggccgcagtccgtttgattgaaggacgtggtctaaatattccctcgttcccgaacccttctccctcgtcacccacgcttgattttgcaattcagcagccgggatgttttttctgccggcgagcgggtgtccgttcggtgcggcaatgcacaattcatcctccataaacggctgaatgtcgagctcgtttttccccgtatgcccttcaattaatccgatatcggcttgaagcatccgaaccgcttcgctgacctcctccgtgtttccgatcatgacgtccaggttcagctcgggatactcgttatgaagctttgcgagaagcggcggcagaatatattcgccgatggtaaagctcgcggcgattttgagcttccctttgacataatgatgatgggcgtaaatttcggatttcgcctgttcgtacaaaaagaccatctgcttggcgcgctgatagagaatgtcccccgtcggcgtagtcgtaaagtgcttcggagagcggttcagcaaggcggtttgaaattctttctccaggtttttaatgtgaaggctgacgctcggctgagaaatcatcagcttctgcgccgcctttgtaaagtttttttcttccacgacggcaatgaatgttttcagttccccataatacaaaaagcatcgcccctaatcattatttttcctaatcgtttagatcatataaatatattttactaatgattaagaccgcagtaaagtggagttatcaagataatgggaagtgactgagatgaagatggtaaaaggtgtttcagttaccgcaggaattgcgtttgcggctttctatgtcagccgcctgccgtttttgcaaatgctcggaatgcttgtccttgcaatgctgatcggcatgctctggcgcgccgtattcggacagcgggcggcattagagccggggatcgcgttctcaagcaaatacttgctgaaagcaggcatcatcctgcttggcatgagactgaatctggcggatatctatcatgcgggctggcacgtatttgcaattgccgtctgctgtatgatgtttgcgggtgccgttgtatacggactgtcccggctgttccgtatagatcagacactcagcacgctgacagcctgcggcacagcgatctgcggggcggctgccattgccgcgatcgcgccgcagatcagatcaaatgaaaatgcagccgccatcagcgcggccgccgtttcgttattaggaaccgtttttactgttgtatattctcttgcttatcatggattgggcttttctcctgcggcttacggagccttttgcggggcaacgcttcacgaggtggcgcatgcggcggcggccggcagcgccggaggaaaagcagccgtcgagatggcggtgatcgtcaaactgacccgggtcgcgctgctcgtcccggccgcattcatgctcggaatgcgggcgcgccgcagcggaaagtcaaagacggcttctgccgcttcgctccccatcccttggtttatcttcggatttctcggaatgagcgccatccatacatcaggcgttatttcagcctcgttttccgcgtttcttgttcaagtgtcttatgttttaatcggcatggcgatggcgggtctcggtttgaaagtccatatatcggcgtttcgtcataacggctggcgggcgctcgcagcaggcttgatcggttctctctgtttgtccctgttcggctgggccgcagtgacgttctttctataaaaaaatgccggccctcgtaaaggccggcttttgcggattacagcgcttgagcagccgtaattaacgcaagattgtagacgtcttccgcattacatcctctggaaagatcgtttacaggcatatttaatccttgcagaatcggtccgaccgcttcaaagccgcctaagcgctgagcgattttgtagccgatgtttcctgcttcaaggcttgggaatacaaatacattcgcgtctcctttaatgtcggagtccggcgcttttttctccgcgacagacggcacaaatgcagcgtcgaattggaattcgccgtcaagcgtaagctcaggcgctttttccttcgcaattttcaccgcttcagccactttgtccgtctcgtctgatttcgccgatccttttgtagagaagctgagcatggcaacgcgcgggtcaatgtcaaacatttgagccgtattggcgctttcaatggcgatttcggcaaggtcctggctgtcaggagcaatgttgatcgcgcaatcagcgaacacatactgctcgtcaccgcgggccatgatgaagacgcctgatgtttttttcacgccttcttttgttttgatgatttgcagtgcagggcgcaccgtatcagcagtagaatgtgcagctccgctgacaagtccgtctgcgagacctttgtacacaagcatcgtgccgaaatagttttcgtccagcaaagctttgcgggcctgttcttccgtagctttgcctttgcggcgttctacgaaagcctgaacgagttcttccatgccttcatatgtatgcgggtcaaaaatgtccacgccgtcaagcgtaagatttaattctttcgcttttgcttgaatgtcttctttattgccgactacgatcggctttaataccttgttgcccgccaagttgttgaccgcaaccaggatacgttcgtccaacccttcaggaaatacgattttcacatcttttcctgcgactttttcttgtacttttgtaaataaatctgccacgatataccctcctctatgttgacaaaaaacgcttacttttacagcatactcttcttccagctaaattcaaataaccaacttctattatagcgctttcaaaaagaaatcttatttttctaactaatttaattgaccgtttgttcacggcatagtttctgacacaaggcttcggattattcaaggtttctccacagccgaaacggttaaactgtgatatagtgaaggcatcaatgtaatgaaaagatataggagtgaagatacatgagtgagcagcaaaaaacgaacgaagccgcccaaacgcttgacggctggtacgcgcttcacgatttccgcacaatggactggacgtcatggaagatgttatccagcgatgagcgcctgtcgattattcacgaatttacgggactgcttgaaaaatggggtgtcgcccaaaaagaaggcaaaggctcgcaaaccatctacagcatcgtcggacagaaagctgattttatgctgatgattcttcgcccgacaatggaagagctgaacgaaatcgagcttgaatttaacaaatcaaagcttgctgaatttacaatcccggcttattcttacgtgtccgtggttgagctgagcaactacctcgcaagcggagaaggcgatccgtatgaaaatccgcatgtccgcgcccgcctgtatcctgagctgcccgaagcgaaatacgtctgcttctatccgatggataaaagaagaagcggcaatgacaactggtacatgctttctatggatgaacgcagaaacctgatgagaagccacggcttgatcggacggagctatgccggcaaagtcaaacagattatcacgggatctgtcggttttgacgattacgaatggggcgttacgctcttcagcgatgatgtgcttcagttcaaaaaacttgtttatgaaatgcgctttgacgaagtcagcgcgcgctacggcgaatttggttcattttttgtcggaaaccgcttgtctctcgacacgcttccgaagtttttgcacgtgtaacacccacccgcctgtccggcgggtttttatttgtcagaatttaaataaaatttgctatttttatcatttttttttacgatgtaaaggagattccattttggtaaaggggtgcagacagttgtcaaaacgaaccgcgtttattatgggagccagtcaggggatcggcaaagcgatcgctctgaaactggcggacaatggctttcataccgtcattaattcacgagttcccgaaaatatcgaatcggtaaaagaagagatcctcgccaaacatccggatgcgggcgtcaccgttctggccggggatatgtcggaccagaagacaagagccggcatttttgaagagatcagatcacaatgcggacggcttgatgtattgatcaacaacattccgggcggctcgccggatacctttgaaaactgcgatatagaagatatgacaaatacctttacgaataaaacgatcgcttatatcgactctatgaaaacggccgcagcaatcatgaagcagcacgaattcggcagaatcattaatatcgtcggaaacctatggaaagaacccggcgccaatatgtttaccaacagcatgatgaacgccgctttaattaatgccagcaaaaacatcgccattcagcttgcgccttttcacattactgtcaactgtctgaatcccgggtttatcgccacagaccgttatcaccaattcgtgaagaatgtcatgaagcaaaacggcatttctaaagcggaagcggaagaacggattgcctcaggcgtcccgatgaagcgtgtcggaactgcggaagaaaccgcggcgctggctgcctttcttgcctctgaagaagcctcctatattaccggacagcaagtatcagccgacggcggcagcatgaaaagcatataataaaaacatcccgctctcagcgggatgtttcttgtaatgaaggaaaggacaaaccgagcttttgaatccgcagcacgaattccctcaaatcgcccttcttggccaccattgatattctgacataacgctttccgccgttgccgaaaatctcgccgggcgtcacgacaacatgggcatgctccagcagatagtccgaaaactggtgtgaagactcgaattcattcggaatttcagcccagacataaaaagtccctttcggtttttcaatgctccagcctaattccttttcacataacgccgtgaaaaagtcaatccgttctttatatgtgcgcttcagacgctcggtatgctcaggatttcctgacagcgccgccgctgccgcctgctgaaggccgccgaacatgccgacgaagacgtgatcctgaaactcattgaccgcctgaatgattttctcattccccacagcaaatgccattctccagcctgccatattgaaggttttcgaaaatgaataaagctccgcgccgaccgttttcgcttctttcgcctgaagaaagctggccgggttctgatcaaattcgaacgcgccgtatgcaaaatcgtgaataagatggatgtcatgtttttttgcaaacgctgccgctttttcataaaacgcctgatccgcagtcgcgcccgtcgggttattcgggtaattcaaaaacatcagcttggcttttttcaggactgcgggatcaatccgctcaaaatccggcagatagccgttttccggatgaagcggcatctcatgcagctccgctctggccattgtaattcccgataaatactcagggtagccggggttcgggactaaggcgatatcgccgggattcagcaggcattgcgtcaaaacgtacaaaccagctttccctccgccgaacagcgcgacttctgtctccggattgaccgataccccgtactctctctcataaaattccgcgatggcttctttcagaaacggatagcctctgaacgggccgtatccgtgatacgaaggattcagcgcagcctcccgcaatgtttcaacgatatgcggcggtgtggggagatcgggattcccctgcccgagattaatgatctgggctcccgttttctccatctcttttaccttttgaaaaacgagcgaaaattcctgtttcggaagtgtcttgatgacgtcggacggtatgatttccatctgaaaggctccttataaatgaatttgctctgattcgttattccgttctgaaaaggatttattgaccagttttgtatgcagaaacagcccgctgaccaaaaggacgataaacgccatgatgactgccgcgtctacaatgttgatcagcatggaaccgacggcgatgcacaatccgatggaggcctccgccaccgaaaaaatccggccctgaatctggttcgccgcgttctcctgaactttgaccttcgccagcacctcaccgtattccattgcgataaagaaaagaatggcggcaatgactgacacggcgaaaatcggggtaaacaaaaacagcgcaagcgagacgatcgataacactgtaaaatacatcagccctttattgttgttaaagccccatttgctgacaagagcggcgccgataaagccgccgaagccgatacagaacgtcaggatgaaattgccgatttctccgtcgcctaaaaagcggctgacaatcgggaaatagctgtagacgacaccccacaaaagcgccatcgtaatcatcgtgaacatggcgtttaacacaaaagcatttgttttgatttccttcaggccttctttaaacgactgaaaagcttccctaacgttttctgactgaatcggcacgtattgaagcttaatgcggctgatgaaaaacgcggagacaagataggtcaccccgttaaacgcgacggcaagctccacagaaccgcctaacagaaaaagtccgccggctgcagcgccgacaataatcgaaatcgtcgtggcttttgcaaacaaagtgttgatatttttaatatccgcttctaaagacgacatgaccgcgagacgtgccgggttaaaaaacacgccgcttccgtaagaaacaaacagcagcgccagaaaaagcagcggatattcgcctttcgggagaaatgtcagccccaaaaagatgacgcctctgatcacatccgtccacagcatgattttcaccctgtcgagccggtccacgagcacgcctaaaaacggctgaaacaccatcggaatactgcggaccgcgatgacgccggacgtcacccagtagtcgtgatagtatgtagacaaaatgagcagagccgggagaacgcaatagtctcccataaacgaaagcgcctgcccgaaaagcaaatacttagagttcggtttcagctgtttcataccggtaacgcatactttgcagtcagcttcgcctgctgctgaatttgtttgattgattcggccacgtcacccgaattgcttcctttcagctcgaacgccgcaatgctgttgaacgcttcgaacagccgcagatccacggatgtacccgcctcggccgccgagaaagaaacgatttcggtgtctccctttaagacgccgccgggaatgtcaatgctttcaatgacgaaatcgacagccgtctcaggcagctggccgttttctttgaaatgctgaggatacaagtggcagtcggcgacatagcatggctcctgctccaataatcctttcggcagatcggcttcttttccgaaacagagaacatccaataacagctgcgccatatcgacgccgaagacctttttaatattcggaatcatgttccagcccgcaaatcgtgccgctgattcaatcagtccggcttcccggtttttcattaatttaatctctgtatgtgttgcgcagttttcgaggccgagtccttcattcgcctttttggctgcttcgacgattttccgcttcgcgtcatcatccaggatggacggcgtaatatgcgatgtctccgtgaatccgatttgcggtgttttatcatgaattgcgacagggaagtattctccgtcggccatgatgccttctatgctgatatagtcggaataaccgcttgtttcgtaccagtcgtcatactcgccctgcaaaaattcttccgcgataaacggcgcttcaaacgtgaccgctttcggtacgttaatcgacttcaggtattcattgactctgttaaattcggcttctgccgtttccctctctttgatgagcgtcacgccgatggagctcgccagatatgtaggctttagaatgagcggcgttccgatttcctgaagcgcggcgcggaaatcttccagcgtcgtcacccgtttgtttttgatagacttgacgccggcccggttgaaagcggctctcattttgtttttatctctggcattttcagcggcctgtacgcccgctccccgcaggccgagacgttcacacgcttttgccatcggagcgataaacagttcattgttggtcgtaatggcgtcaaccgcgaacatgccggccaccttgacgatttcttcgactacttcttcctcaggtttgtcatgatcttcatgagcccagtaaatcgaatcgggatgctcaaaatcagccagactcttaaaatagtctttatcttttatgaccgcgaccgagtatttttcaattaatgccgcatgagaggctgtaattgcaaaaggtcttggaataaagctgacgaggttgtatttttcggctgcgcttttgtaaaacatatgcggcgggcatcccccaaggtcagcgataaccaatactgtttttctctccatatgtaaacactccttctctattgtgcggtgtatccaccgtctgcggtgatcgcgcttccggtcatatagcttgataaatccgacgcgagaaacagcatgacgttcgctatttcttcaggcttgccgagtctcagcagcggattgactttcgctttttcttttttgatttcttcaagcgtgccttcgttgttttcaaggaacgacttttcattcaaaggtgtgtcaatgattcccgggcacacgcaattgacgcggatgttgtgtttggcgtaatcgacagccatcgaacgcgtcagctgcaatacgccgcctttagaggcgttatatgcgggaatgtcgggccatgcaacgactcctccgacggagcacgtgttaatgatattgcccttgccgcttttgagcatatacttgagcgcgtgcttgctcataagaaacatgcccgtcagattgacgttgagcaccttgttccaatcgctcagctccatctcatgaatcggggcgacaatttcgatgccggcgttattgattaacacgtccaatccgccgaacttgtccgccgctgactggatggcgttttgacatgccggctcatctgtaatatccgtctgcacaaaatgcagcctgtcattgttttctttcctgatcatcgcttctccctgcgcctcatcaatatccgcgacgaccacattcgcctgctgattcagaaacgcctgaaccgcggcataaccgatgcctgatgcgccccctgtgatgaggacggttttatccgtcaggttcatgactcttccgcctctaattttttcgcttttgctctgttatagcgcggagggaaaaagatattgactgattttgaatctttttcaaatctgttgatggcgccgtgatcttctctcggatcgcagaaataagctgtgccgaatgtcatatccactttgcagccttcaatggtcatatcatagccgccgccgatgcagatgccgatctgttcattgcggtgtttatggaacggcatttctcccccgttgcccggaatgttggcaagcatgatttccacccagtcttccacgaagaacgtgacttccataccgggcaataagtctctcgttttaaaaatattcaaaaaataatcttcagggcttgtgtaggtttcaccggctttcaggcgtttaatatcaatggcgatcacttcttgatccgtctcatttcttgcgccgtgaggcacattaggaggcgcgatataggctgattccagcgctgtcatctttcttgtgacatctccgacagtcatggacagctcgccggaaacgacaaggccgatttggacttccttatgctgatgcggttccacgtttgtatgcggcggaacgtaagaaagcagaacttccgtatctcctctgacggacgaatattgtcttactccgttatcccattctattaatttaggcgtcgggaaataaagttcctgcaaatcttgttcagttttcatcatgaatctctccttttccgaataatgaccagctcatgggaatgcttttaaatgttttgacaaagtgaaggccgtacttttgtctggccagctcatttgtcagcgcgatgtcggacaaaccgtccttcactcttttcgcggctgcgctcgttgagttcaccagatcaaacgtgacatctttacgggtaaaatacttaatcaaattgataggagacgggtgggatacgatgacagtctgatcaagcatgtcatccgtatattcaaaaccgggccggacagccaggccgtacatcggggtgtcgcacctgaaaatttgcagaagctgcagatccggtctcatgtagaagtgcttaatgccgtcatacgcgtgaggcacaattgtgtattccagcggactttgaagcgttttttcaatgcacgattcaaatgtatcatgcagtgataatttactgttcaccccttggagaagggtaaaattggtgataaagttttttgctgcgtactcactgcttgtcccttcaggaccgagcgtgttgatcgtaatcagtttagatattgaataagccttgcttttcgtttgaatgctattatccaatataatcatgagcaccaaccaatctgttaaattttaagtaaatattatccatagatgttcaagctgtcaatattatttgaaaatattgataattattcctatatattagaaaacaccctatgaaatagggtgctaaaaattaacatttacaaaattatagaaactttattttaccgatacaatgattggtcggcctgatgctcatatttctcataccttctgtatgcgaaaacgctgaggacaaagccgatgagggtgacggccgcacagataaatccaacagctgcatatccgtatccgacatagaccggacccatgacagcagaacccaaggtgacggccaaattggacgccaggctgtaaaatgccatgattttgccccggcggctctgtgagcaatcacttaaaatggtgctgagcaaggtcaccgtcaggctttgcatcaatccccagacgaataacccgatgaccaaaaacggcattgatgacggcgcataggcgagacaggaaagccatatgctgatcacggccaatgccgcgatcaaagagcgcattttccccgccttatctgcgatttttccggtgaacacgctcatggaaaaaccgactccgtacaccatgatcagcagccctgaagctgtattcccccccggcagcacgcggtgaagatatgtgccgagaaaggaatacatgccgtaaaaaccgatcatgttgcaaaaagtgatcgtgaggtatacagggacacggggcaccttcagcgcatcccggaaagtgcctgcctgccggccgttttcctcttctgttttatccccatccgccgtgctgcggcgcgcctcaatgaaaatgagcgaagcaacgaggacagacatgagggcgaaaatccaaaacgtccaccgccaatttaaaacgccgccgataaaagagccgatcggaacgccgaaaatcaaagcgagcgaccagcttgacacgatcagacccatcaccttgccgcggtacgcataaggcacacggtcgccgaccaccgcataagctgtcggcacaaacgcacccgccgcaagcccggaaagcgccctgcccagaaagaagaaaaagagattgtgcgccagcgcgcagatcaccgtgccggccgtaaatataagcagccccgccatcaggctgagttcccgggaatatttatcgcccagcggaacgagaagcggcgcaccgataaaaatcatcactccgtaaatactgatggaaagcgccagcacactgacatccgagctgaatgcccgcgctaaatccggaagcagcggagaaatcaccagctcttcagaacccgcggcaaatacgcctaatgtcaaagcaagcgcgagacagatcggaaatcggcgtttcgtttcgatgtgatcggtttgtttgctgttcatgctctttgaacacctcttccgtaaaacttttctaccttttgttgttttatagtttagcatccttatgtttcattttacatttcaaatgaaaactaattctgttttcttatttacattcagattttaaataaaatatttagtttgtattcaacaaatgatataaaatacgtcgtccggttatgctatagtgatagaatcatttgttaaggtgggggtcatgaaatgaataacgctgattcaaaggccgcccgcgcaggcctcggcatggtactgattctcgggacgctcgcttcattcgggccgctttcgctcgatatgtatctgcccgctttgcctgaggtggcggccgatcttcatacgacagcgtcacttgcgcagctgagcctgacgttttgtcttttggggctggcggtcgggcagatcgttgtcgggccgctcagtgatatgatcgggcgccggaagccgctcattctgtcattgctgctttatacgctgtcttctttattatgcgccttcagcccttctgtttcgtttttaattgtcatgaggtttattcaaggattcaccggggccgccggaatcgtcatcgcacgggcgtccgcgcgcgatatgtattccggaaaagaattaacggcttttttctcattactgatgctcgtcaatggggcggcgccgattttagcgccgattacagggggatttatccttcagttcaccggctggaaaatcgtatttgtcgtgctggcggtgatcggctgtatcatttctgccgccgtgcttaccgcgttgcctgaatcactcccgccggaaaagcggacaagcggcggactccgggagacgctgatgacgtttcgcggcctgcttggcgaccggatgtttatgggatttgcgctcagccaggcatttgtgatgaccggcatgttcgcatatattgccgggtcgccgtttgtactgcaaaacatctacggcgtatcggcgcaaatgttcagcctgctgttcgccgtaaacggtgcgggaatcatatgcgccacccaaatcaccggacggatggccaaaacacatgatgaacggaagctgtttgtctccgggcttttgatcgccgtcatcggaagcatcgctttgcttttatcacttgcgtttggtttaggcctgacggcggtctgcatttctttattcatcattgtttcttctgtcgggatcgtcacgacgacagggttttctctggctatgcagaaacaggagaaaggcgcgggaagcgctgcggctcttctcggactcctgccctttatcggcggtgcggctgccgctccccttgtcgggattgccggagaagaaaatgcctggccgatggccgtcagcattttcggttttgagttctttgccgttctatcctatgtgctgtcggccaaacgaaaaacaaagtaaagcccgccgctttttgcggagggctttttttcttatccggcagcgccttttttcgaagaagccggctcacgattcaggcgttttttaataccgaagtgataatacgcgtaacagatgatcatcagcgggacgccgcagtacagaccgatacgctggtcggggataaagatgagactgattaagataagaccgtaaaccgaaaatccgagaatcggcacgatcggataaagaggcgttttaaatgccaggtctttcagatttcctccttcagcgagaaagcgtctccggaaaacgaattgtgaagcgcagattgacatccacgcgacgacggtaatcataccggagatggaaatgagccacacatacaccgtttcagccgcgaatacacttgtcagcagggataaaccggagatagcgatggtgatggaaagagctttcagaggcacgccttttttcgtcagtttcgttaaggaagcgggacccatcttagtttttgatagggaccacatcattctggacgaagcgtacagcccggaattcgccaccgacagcatggcggtcaggatgacaaagttcatgatatcagccgcatagggaacgccgattttatccagcacagccacaaacgggctttcgatgacgcctgccgtttggtacggcaaaatggacacgagaacaaacatcgccagcacgaagaaaaacagcgtccgccatatgacgtttcggattgagcggggaagcgtcttttccggattttcgctttctcccgaggcgattccgaccagctcggtgccctggaatgaaaaattcaccatgacaagggtaaacagcacggcttgggcaccgttcgggaaaagccctttgtccgtcgtaaagtttgacagatacggagccgtctgcccgccgttaaaaccgacaaagccgaataccgcagcgcagccgagaataataaacaatacaatggccatgaccttaatgctggaaaaccaaaattccatttccgcaaaactccgcgcagacagcgcgttaatggaaaaaatgacgacgccgaatacaaggcaccacacccaaatcggaacgcccggaaaccaccgctgcattaaaatccccgccgacgtcagttcaagccccactgtattggcccagctgaatgcgtacatccatccgatcgtaaatcccgtcgacggcccgagaaactttgccgcatacgcctgaaatgatcctgcgaccggcatggcgaccgcgagctcccccaaacaaagcatcaccagatacattaaaaatccgccgatcacataagccaatatcgcgccgatcggtcccgcttcactgatcgtaaaaccggagcccagaaaaagccccgtcccgatcacgccgccgagggcgatcataaacaaatgccggcccttcatcgtgcgctgcaattcagtttgattggtatctccctgcatatacatcccccttattccgttatgtcagccatttgtgcgtatgtctaatcggtagctgtgcaaaaggtgcattgttgtctgctgaatgagctccggcagcacatggaatgtgtacggcttgtacacgcgttccgtccatttatggccgtcctttccgtatacccctatattgaccgacggaatattcaattccctgatttctttaaaaggaatcgtcccgatgacatcccagcccggaaaattatcggtaaaggcggagacctcctcgtctgtttcatgcagcgataaaaagcttccgtccgctaaataagggaaaaactttttaaaggcgaatgtttctccggttgacgccgctgttttatcgaccgcttcttgaatgacatgctgcaaaagccggtcccgtgtgctctcttctttcagataattgtgcggaaggtaaggcggcgcatagaaaataatgaccttggctccctgctcaggatcgagtttttgcagttcctcgacggctttaaagcatctcatccgcagttcaagatgttcatatgttttaaatgcctgcccgatacactgtgcagggtctatcccgcggcttctcagccttttcaggtaatcttccagactgtacacttgaacgttccatgacatctcttttttcggcaggctcgttctctcacagtattcgtcgtaataatcagataattttcgttctgtctctttgcaggcttcgtcagccacggcggtcagctgatccatgacttctttggcggttttctcgtaaataaaataattaaaatagacatagctgctgacggcggtctgcacgttatacgcttccttgttgtcacgctggtacaggcaggtcggcggaagcacaagctccccttcaatgttttccgccatatgaatattgttgtgaattcttctggtgatttctgacgcgatcaaattcgggtcgatgccggacagcgtatcaccgacatgcacctcccgcccgtaaatcgcaaagcaaggcaaaagcttccctgccgcgcccgtgtagatgtaccttgtcgtgtcaccctcatacagcggggtgataaaatcgttattaatcgctgctaaataacgaagctgcttttcttgtttcagccgttttaattcagaaatgctggttaaaatgccggaatgctggctttcttcatccgggtttgccatgaacagaatatggcccggcagctgatcgcgccgttcagaaaagtgaagcagattggcgagatgaacggcaataccgctctgcatatcaaccgaaccccttccgaacatccactcgcctgagcgggcgtcccgctgcacatcccgatcaaattcatagtttgagaaatactccgcgagacggtcggaatcaaaagcgatatcttttaaagggccgaaatcctcgatgccgaccgtatcaagatgagcgtgataaatgaccgtattcaggctttcgccgttaccctcaataaatgcaaaaatatttttgcggccgtaagggtcctcaggaatcgcctgctcccacacatgtgacggattctcctgaaagtagggaaagctcttgatcatatctttgatatagtcggctttttttccttctcccaatgtgccgttgatgctgtttaacgccaccagtgatttcgtaatggcttctattttctcctccggaagcattttgctgagctgctgatacatgttccatcctccttaccctcatatagagaaaatagcgcgactctctttttcatcgcgctatttccgaaagattaataggcttcagacgttgtttttgcctgcatatgaagaatcagatagtcaggtcctccggcttttgaatcggttcctgacatattgaagccgccgaacggctggtatccgacaatcgctcccgtacatccgcggttgaagtatagattcccgacgtgaaaatcttcgcgggcgcgttcaatgtgcgcgcgggttttcgataacagagcgcccgtcagtccgtaatcggtattattggcaatctcaagcatatggtcgaaatcacgggcttttgagatcgcgacgaccggcccgaaaatttcctcctgcatcaggcgggcgttttcatcaacatccgcaaaaatggtcggctgaataaagtatccttttgaatcatcaccttcgcctcccgtcaggagttttccttctgttttgccgatttcgatataactcatgactttattataagatgcttcgtggatgactggccccatgtatgtatcaaaatcttccggacttccgacggtgagtgattttgttaaagcgacggctttttcaacaacttcatcatagacgtcctgatggatgaccgcacgggaaccggctgaacatttttggcctgagaatccgaaggcggaatacacgattgaggaagcggcaagatcaagatcagcatctctgtctacaagcaccgtatctttccctcccatttcggcaatgacccgtttcagccacttttggcccggctgtacttttgcggcgcgttcataaatacggcatccgaccgcgcgggaacctgtaaacgacacaaatctcgtcttcggatgctcaaccagatagtcgccgatttctcctccgtcgcccggtatgaattggagcacgccgtccggcaggcccgcttctttcatcacttcaacgaatttcgccgccacgacaggcgccgcatccgccggtttcagcagtatcgtgttgcctgttacgatggctgccgccgccgttcccgccataatcgcaagcgggaagttgaatggagagatgacgatccccaccccaagcggctcatagtgatactgattatattctccgtcacggctctttacaggggaaccgtctttcagtttcagcatctgacgggcgtaatactctaaaaagtcgatcgcttccgccgtatccgcatccgcttccttccacggttttccggcttctttcactagatacgcggagaattcgtgctttcttctgcggatgatcgccgccgctttaaacagcacattcgcgcggtgttccggccgtacttttttccatgtttgaaatgcctgcagcgcagcctgcatggccttttccgcaagttcttttccggcggccgatacagaaccgatcacttcttttttatctgccggattgacggaaatgatctttttatccgtttcaatcgcttcaccgttgatgataagcggataatgcttgccgagctgtgaattcacataagccagcgcttcctgaaacgattgtttatttgtctcttcctgaaaatttgtaaatggttcgtgtgcgtatgaaactgtcattagaattcctccccgtattttgtaatgtgtgctcacgctttatgaagatgcaagaagcataccagcatagcaatttgtgataaaaataagaaaatctttgccgaaagcggacgaagcttgtccgaatctgtcagctgtaatctgaaaacgcaaagaaattttgcgatccgctatataactgatgcaaaatctctttgcggataacacttatacccagccgcggaaacgggccgcttcagccgactttctgatgcccgtcatataggcggccaaacgcatatcgactttgtgggtatgcgctgtctgataaatggattcaaacgaattcaccatgacgctgcgcagttttccggcgacttcctcctcagaccagtaaaagccttgattattttgcacccattcaaaataagacaccgtcacgccgccggcgcttgccaaaatatccggcacgagaagcacgcctctttcattcagaattttcgtggcatctatcgttgtcgggccgtttgccgcctccacaatgattgaagctttaatgtgatgggcgttttcagccgtaatctgattggagattgcggcgggcacgagaatatcacagtccttttccagcagctccctgttcgttatgacatccgagaagagattcgtcaccgtgccgaagctgtcccgcttatccagcaggtaatcaatgtcaaggccgtcagggtcatacaaagcgccgtgggcgtctgagatgccgatcaccttggcgccggcgtcatgcataaatttagcgagaaagctccccgcatttccgaacccctgaatgatgatccgcgcattttccaatggaatcccttttttcttaacggcttcctcaatacaaatcgtgacgccttgcgcggtcgccgtctcccgcccctgtgaaccgccgagaacaatcggtttgcccgtaatgaatcccggtgaatcaaattctctcaggcggctgtattcgtccatcatccatgccataatctgcgagttggtatatacgtcgggagccggaatatcctttgtcggaccgacgatctggctgatcgcacgcacatatccgcggctcagccgttccagctctccgaatgacatcgtccgaggatcacagatgatgccgccttttccgcccccgtaaggaagatttgtgatgccgcattttaaagtcatccagatggaaagcgccttaacctcttcttcactgacttccggatgaaaccgcacgcccccttttgtcgggccgactgcgtcattatgctgtgagcggtagcccgtgaaaacctgtactgagccattgtccattttgacagggatgcggacggttaaaagccgcatcggctctttcatcagttcatacatattgtcagggtaccccagttttcgcagggcctcttttatgatcgattgtgttgacaagaacaaattaagaacttctttttcttcatctttctgattgcttttagaaatcgggttggctgacatgttttatcacctcatcgtattttacgtgtaagcttcaattaccggcagaacaaaatgtaagcgcttttacaccaaaacccatcaatccctttcacattgtcgttacgcccttttttatatgcaagattcatgccaggttttttgcgcataaaaaaaaagaggctgttgtcagcctctttcatccccgattaacgcgggtcaataaccagctttgtttcggcataaagactgccggcccccaaaccgtttacgtaatcgcctttaattgtatacgcgcccgcgcgcggaaggtttttacgcactaggacgagattgtattcagacgcgcccaataagtcaagggtaagcggaagtctgaccgtttttccgtagttgagaatttgcgtttctttcagtgttcttccgtttacagagtccctcacagtggcgttgaacccgtcaggaaattgaaattcaacggcgccgacggcaagcagcgcattcggcttgtatgtgacttcaatatcagacgtcgcgtattctttcgtactattgacggttttcgcttcaataacggcagattgggcgttcgcatgaaaagatggcaagaacacagatgaaaataccgcagcactgatgagaaaggccgaaaatgattttctttttaacatcatgaattcctccagatcatatgggattcagagcgtcctctgccggaaaagcgtgtctgatggttccattcgcgaattgggtttctcttttcctgagaataatctaccacctttatccatggaagtaaattattttttagaatattcaatcatttatttttcacgagatgaatcagcacaaaaaacgaagacatccgctgtcttcgtcttgtgcgctatcggtgagccgtctgccagtcaaatccgatggtgtcatcattccacggaattcttttttcgtcaggctgatccggattgtaggacattgtcgtgaaataaataatggtcagcggggtttcacccagcactctgtacccgtgtgcgacgcccctaggaatgagaaggagcatcggattgtcttctcccatgtagtagacatccgtttctcccttggttgccgactcttcgcgaaggtcatgcagcacgacctgggcgtggcccgtcggaaaaaaccacaggtcatcctgtttctcatgatagtgaaatgctttaatgacgccggggtagcttttggaccaggaagcctgcccgaaacgctctaagagatgttcatcgtcacggacgagttctgagaaaaaaccccggtcatcgctgtgtttgatcagctttttgatttttacgccttcgatcacttgcactgtccctccctttgtaaataatcatgcagcgcttcccgccaatgcctcatgccgagcccctgccgttcaatcgactcaagactcaacaccgagtaagcggggcgcggcgtctcatttccgtattcctccgtcgtgacgggcagcacggaggcggttctgccgctttcttcaaaaatagccttggcaaattcataccagctgcacactccgctgtttgcggcgtggtataagcccggcggcctgtcaaacagaccgatcaccgtttcggctaaatcctttgtgtacgtcggcgctccgacttgatcgttaacgacacgcacctgatcatgtgtatccgcaagtttcagcatcgtattgacaaagttgtgcccgccgctgccgtacacccacgacgttctgataatggtgtggttttttcccgttaaccggatcagttcttcgccgagttttttgctttttccgtaaatcgtgcccggatctgcgggatcatcggtctggtatggccgtgttcctttgccgctgaagacgtaatcggtgctgatgtgaatgaatttcgcgccggtgttttcagcctcaagcgcggcataataagcgccgattccgtttattaaatacgctttgtcgagctccgtttcacatttgtcaacggaggtgtatgccgccgtattgacgacgatatccggcttgtaatggctgaacgagtgccgcaccgaacgctggtcggatatgttcatcatcgcttttgtcaaggcgatcacttcatacccttcccgcttcagctggcggcataactcccgccccagctggccggccgctccggttactaataccttcgtcaatcggatccccttctttccgattagtcttggctgtttgtataccagcgaatggttcttctcattccttcttcaaatgtgacgtcctgccgccatcccagctcatttttcagctttgaagcattgatggcgtaacggcggtcatgcccttttctgtcttcgacatgagcaaaccgttcctcgacaccgagctccttcatgataaatgacgcaagctctttattcgtccgttcatttcctccgccgatattgtaaatgtcaccgagtgttcctttttccagcacgagcttaatggcgcggcaatgatcttcggcgaacagccagtctctgatctgcatcccgtcgccgtacagcggaaccggcgtgccgtttacggcatgcctgataatggtcggaatcattttctcgtgatgctggtacggcccgtaattgttgctgcatcttgtaatgatggcaggaagcttatgggttctcacgtaagacatgacgagcaggtctgagcttgccttgctggcggaatacggattgttcggagaaagcggcgtcgtctccgtaaaagcgggatcatccggcgccaaatctccgtacacctcatctgtggaaatgtgaatcagcctgccggcttttccctgtaacaccgcgtccgccagtcggtatgtgcccatcacatttgttgtgataaacggctctgcctgatttatgcttctgtccacatgggattcagccgcaaaatgaatgacagcgtcatacatttgggaaaagactttgtcaatgtcctctttttcagaaatgtcacctttgataaaacggaaacggccgttcttttttaaggcttctatttcaagcggcctgcttgcatacgtgagattatccaggacggtaatctgcgcgtccgtttctttcagcatcatctttgtaaaggtaaggccgataaatccggcgccccctgtaattaaatatgattttggcatgattaatgctcctgtcctttctgtaatgcctgatgcgccaggcttccggcgaggtagagcgattcatgcgtgcccgcatccacccaccagcccgttaacacatcatacgtcagctcactgtgttcaatgtataaattattgacatccgtaatttccagttcgccgcgttttgaaggggaaatttgttcaatataggaaaacacttctgcgtcgtacatgtagatccctgtgacgcatagtctggtcggcggctgctccggcttttcaatgatcgacttgatccgtttgtttttctcatcaatctcggcgatgccgaagcgctccggatcgtccacttctttcagcagcactttcgctccttttccctgctttgcgaaacgctccgtataaggttttaatgaatcttcaaaaatattatctcccaaaagcagaacgaacggatcgcgacctgtaaaccgctttgcgtatgataaaccgtcggatatgccggatgcggctggctgaacctgatatgtgattgagacgccgagctcttctccggtttcgagaagtttatgaaattgcggaatatattctttttgcgtaatcagcaagatatctgtaatccccgcttcttccagcttcatgaccgaccagtaaatcatcggatatggaccgacagggagtaaatgcttattgaccgcttttgtcagcggcataaggcgtgagccggtgcctccggctaagataacacctttcacatgaacacttccttacgtgtggttttatcacaaatcataaagaatcgccgccgcccgtttgatgcccctgccgtcaaccagcggctttccgtattgatgaagtccggtccgcatcggataatcagcggccatgtcagacatatgccgcgcgagaacgtccgctgatatgcattcaccaaggccgagatgaacggcggccccccgtgcggcgaatttttccgccgtctcagtttgatgctccacttgagaaagaacgatgcagggcacacctgtacaaatggtttcatataaagtgatcccgccggacacgacggccatatcagccctcgtgagaagcgcggccatgtcatttgtctgcctgaccatctcggcataaggcatttgtgtaagatgcgcgcgcacgtcatcagcatgaggcgcggcgccgcccatgacgatgatcactcgttttcgatgaatgtcggggatgcggcggcatgcttccatcactttaaagacaagcttcttcgggtcgcttcctcctaatgagaccaatatggtccggcattcttttctcagctgataaagctgctttgctttttcaaaacccggatgaagaatcaaataatccgggccttcatataccgcggcgctgcccatttgaaccgtccggcttttcagccctccgtaaatgccgtttataacggcatcgcataaatgaatgacatgttcccgtttttcttcaaataagacgatgcgtgccgctgaatgctttttgacttcctctaaccagtcacacggcatatcgagcagatcgaatatgagaaggtcaggagcctgcctgtttatttcccggacaataaattccttctgttccttgtcaggcttgatgatcacttcccattgatcagaagacagataagaagaagcctctttatttgcgtaaaacgttattgagcaattgttcttaatggcaccggcaagcagcttcatccggaccgcgtgccccatgccgatgtcacggcccccgtccgcgaaaatcaaaacccgcatgctaatcagcctctttttgccggatcatttgattaatggccctgagctccggatcactattcagcagatggatcaattctcttgccggaatatcaggacgcgagcccgcttttacgtacagctcgcgggccagcctgtagtcctcttctgtatcgacggtcatccgcaagtgaggagcccggagttcctgcggaggttcaggaaagagaagccggtacttctcaggagattctcttattaaaagcgtgacatgctcctggtatttgtccgccagcgttttgtcggcattgatctccgttaaaagtcgcgcgtttaccgcctcgccgccgatgccgagcggtgtaccgcagatatacgtgtagtctgcgtgctgatctaaatgcgattgaatcagaaaatcaagcagcgaagggtcgacaaacgggttatcccccgtcagtctgactgcgatgtccggttttacttgttcgatgacttgtgcaaaccggtcaagcacgcgctgctcgctgccgcggtgcacacggtagtgcttgctgatgcagtgcgcagacagaatgtcgtcggtcttgctgtcagacgaggcgacgatcagattatcccgcgattgatcataatacgcgctttgccgcacccttttgacaatcatatcgaggatcgtatacccgccgatcggtttcagcactttaccgggaagacgcccgcttcccatccgcgcctgaatgataaacaaaatgtcagtcatcatatgggctgcctttcgtcaaaaggtcatcccaagtgatgcccgtgtcggcggggatatccctgaccgcacgcgccccgtcagttaaaagttcaaaatatctcgggtggagcccctgcggtttttggccgggacgaaggacagcaaggttttccgccgtaaaacattcgcctttttgaatcggcgctgttgaaaaaatgcctctgtaagcgaaccttctgatatccccttcaatcggtgtcgtggttttatgggagcttcccgacagcacttccggcaccggagcgtgatgcccctgccgcagctccgcttcaactgagcggattgccgcaaccatttcttttaattcatccggattgagggcgaaggagtgatcagcaccgggcaggtttttatcgatcgtaaaatgcttttcaatcagtttcgctccgagcctgacagccgcgcacggcacatcatacggatgggcgctgtgatcggagaaaccgatcacagcatccgggaatgcagcggcaagcatgggaatgacgctcagattgctgtattcaggcggcgcgggatatttcgccacacaatgcatgatcgcaatttctgtgttcccctcgccggtaatggtttgataagcctcctgaatatctgaaatatcagcgcccgcggtggaaaaaataatcggggtcttcagccccgcaacatatttcaataacggcagatggttcagctcgtaggaggcgattttaaaggctgaaggcgaagtcgcatacagtaagtcggcagagccttcgtcacagaccgtgcttaaaaacagcacgccttttttcttacaatattcaagcagcggttcgatccactcggcgggcatttccattgattgcaccaaagaaaaaatagagacgttttttcccgcagcggttttgtacaagccggggtctttctgatacattttgtcagcctgaaacatttggaacttgaccgcgtccgcgccggcctcactggccgcatctatcaattcaaacgcctggctcagttttccgtcatgattaattccggcttcggcgatgatgaatacgggtgaaccttcgccgattgacttcgttccgatttggcatgatgccatcagtccgcctccttcccgggccacacatgatagtagtaataggacgcatccgctttaaatcccattctttcatacaggcggatggctcttacattgtggagctgcgttcccgctgatacagtcttatgctgaaagcgcaatgattgttcaatcacatgcgccgctaaatggaatcccgctccttttccttcaaatcccggctttaccgccatcagatcaaggacgaattcatcgcctttagacagcccctgaacaaagcccacggtctctcccttatatgtggcggcgaattgtaacgaagctctgccttccgcgttattccgcgcccactcttcaaacaggcggtttgcactttcatagctgaggcgggggtcttgataatacctgctttttgtaaaggcgtcgcgggccagccggctgatcgcttccgtgtcgccgggtccggcttctgtaatctcaaatggcggcgtgctgttataaacacgcaccggactgacgagcttgagaagactccctacaaaataagcgttcggaagctgctgaacgacctgcatcgcgccgatatcttcagccggtattttaataaatataaaatcagtgcctgccgcccgccttgccgcgtaaaattcctgaaacagccttttgagctgtccggcgctgtttgcggctgcaagcttcacattgatgatattttttcgaaacaattgactttcccacgaagagttttcatataaaatcacgccttgaaggctgttttcttccaataaacagagcgacgattcataggcttccggctgaatgcccttctgatgcaggaaggtatgaatcatgtcctgcgcaagattttccctcagtctgtacacctaatcagcccctttgacgatatccgtaacggctgcaatgacgtattcaacgtcgtcatctgtcattgacggataaagagggagtgacacggtgcggtgataatacgctgcagcggccggaaagtcagtttccttatacccgtacgttttttgataatacggatggaacggaaccggaataaaatgaacacttgtgccgatattatattggtcttttaaagcggaaatcagatcgttccggctgaccccggcctcctgctcctctatttgaagaacatacagatgccatgcatgccgtccgtcatcactgacatgcgggatggtcagccctttcatgtgtctgaaggcgtcctggtagcggctcgcaatgtcggctcttctttgctgcatgctgtcaatccgtttcagctgatgaagcccaagcgctgcctgaagatcaaacatattcattttatagccgggcgtttcgacctcgtagtaccagcttccgtttgaagaatagcggttccacgcgcctttgctcatgccgtgaaggctgagcaccctgatctgatcggcgagcccgtcatcgtccgtcgtcagcatgccgccttcaccggttgccaggttttttgtcgcgtagaagctgaatgccgtcgcatcgccgattgatccgatcattttctgtttatacgtggtatacacggcatgtgcggcatcctctaagacaaataactgatgcttttcggcaatggccagaatctgatccatatcacacgactggccggcgaaatgaacgggtacaatcgcttttgtccgcggggtgacggccgcctcaatttttttagggtccgcattcagcgaaagcggatcgatgtcaacaaacaccggaacggcgcctgtgtgcacgattgtattggccgttgaactgaacgtcacggcagacgtgatgacctcgtcgccgggaccgatccctttcgctttcagggccaaaaacaaagcggcggtacatgagttcagcgcgatcgcgtgctttgcccccgtccaggcggcaaaggctttttcaaacgcctctactttcggtccctttgaaagccagcccgattcaagcgtatcaataacctcctgaatttcgtccttcccgatcatgggcaatgaatagggaagaaaagctgatcttttttgcaccattttctttgcgctcctatcttttttatgaagggtcaacccgtctgaagctgactccggttttttcctgaagcacttggcataaagcggcaagcgaatcctgaaccgggtagttcgcggcgacaaaagcacggcgcgcctgttccgctttttgatattctgcggggctttcgcatatccggattaattcctgagcaagtgcctgcgggtcctcaaagacaaattctccaagtgagtgataataagggtatcggcgggttcccgctgattttccgatcagcacgggcttttgaaacagcatcgcttcaagaccgaccgttgatgtctgtgtcaccgcagcgtcaacatacgggagaatatcatacagctccatctcttttttgatgattttgcctgctttatatttccgcagcacctgattgtaagcatccagcttgtttttgccgatttcccacggatgcggtttaataatgagctgcatgttcttttggccggcaagctcttcaagcactcccgtataaaattcatcagaaaacggctgcgtggcgatcagcgccgtccgctgtgacgggagaaaagaaagtttgcggtaaaacgtgtcctgatctatcggctctcttgagaaaatctcgtcgaaacggggatgccccgtgatgatgatttgttcatccctgcagccttttgctttataccactccgcttcataagccccgaatacggcctgatagtccgtaaatacgggcagaaacgcttcatctcccatgagcgctccgtgctgcagacagatgctgacggcgttttttttcgcggacatcagcgccagcacacggctgtaaatatcctccgtcgtgccgactacaacggcggaaatcttttcggccgtaaacaaaatatcaatggcgtcaatcgcttcaataaataacgggatgtctttatacaaacgttcctgaaattctctgtttccgaaagcgggatggctgtgaagctctttcaaaatggaatgggctttttcaatataagggacggggttccctttttgccccattcccgtcagctccaatttgcagataacgggcagcccgtaatggtcaggcagactccatctggccagtaccgctgtttttgccggatcaaactgccggtagtttccctcggtgaaccgaagatgatcgaaatgcagaatgacctttccgtttaccggtttctcatctgttttcttaatgttttgccttttttgatcataatatggctgtataccggcttcaggaatatgctgatcagccggaccgaaaagctctgggttctgctccatgctctcccgaagcgccggactgatatattgataaaaattactgatcaatgcgagcgggatgtctttgtagcgaagtgactgaaaaaggtcaatatactgccggtacagcacccaatagttcgctaagtatgccgacaagccctcacccctttccaagcttttttaatgattccctcagctcccggcacgtggtctgctgcggaaggctgttcacaaactcgtttttctccgccgcgaaaagctgataatggatggattgatcggtaatataattgatatcaagctcctcagaaatcgggtaaaacggataaaaatgattcactctccagaagaaacgggcgtcaccgatccggtaaaacgccgggctttcatcccaataggaaccgaatgccgatttgacctgttccagcacggaaaaccggtgcatgaccgaacaatggtcaatggcgcacggcgcgttccacacgatccgttcggcgggcctggccgtctccttcaccgtctctttccgctgattcagatgataggttttggaacttgaatacacgacggctttttccgggtcttcatcaagctctttcaccattttctcaagccgttccggcacatacgtgttgtcgtcggtcgcatacgtcacgtactcgccctccgccatttctattgcctgattaatcaaggcggcgtagcgtgttttttccgttctttctttgacgcccgatacatcgctttgataaaaccggatgcggtcatccgtgagaaaaggacgtatttccgccaatgtcgcttcatttgagttgtcatccataatgaacagctcaaagtccgtaaacgtctgagacagaatacttttaatagagcgggccacatagtcacttttgttatagctcgtcatgatcactgacactttaggcaactcgtcacccccttttcgcacctgaaactaccgctatcatatgttccttatgcggaagatgcgctaggaatacagactattatgtgaaaagtcagcattgcgcgcacaaaaaaagccggctctgatgtccggactcattggagcgtattttcttttttcgcataaatctttctttgggctcatatggtggaatagataaaaacagcagccgctctgtcggctgtctgatacttgtcaggaggtttcagcatcaagaggttttcatcaaaggaggaacaatatgaaaccgaaaaagaatcaatatcagcaaatgcaggggatggggatgggaatgggaatggatatgcaaggataccagccgcagctcgggcctaatccttatccgcagcctcagggccaaggatcacaaatgatgccgatgcagcagcaaatgacaatgccgatgcagcaaggccagcagagcttcggcggggggttccccggccagccgcagcagcagggcggcggcagctttcagattccgtcaggtccatcatcgtcacaaaacgttcccggcatgctgccgattgaagagtcatacattgaaaatattctgcggttgaaccggggcaaaacggcgacgatttatatgacatttgaaaacagcaaagaatggaattcaaagattttccgcggtgtgattcaggcagcgggacgtgaccatatcatcatcagcgatccgaaaacgggcacccgctatctgcttctgaccatttaccttgattacatcacgtttgatgaggaaatcgcttatacttatccgtactccatgtcttcttattctccgagataaatcaaaaagccaatcgctcatttgacagaggattggctttttttctttataaatatttgacggccgcgacgataatcataatccaagagatgataaacgccacgccgccgagcggtgtaatcgcgccgagaatggaaatctgcgtcacgctcaatacgtacaggcttcctgaaaacagaacgatgcccgcaaacatcagccaacccgcaacagaaacactgcctgcgccagaaagcttttcggtcaaaaacgcgacagccagaagaccgagcgcgtgatacatatgatattgcacgcctgtgtgccacacctgcaaatatttatcggggattttcccttcaagcccatgcgcgccgaaagcgcccagcgccacggccaataaagcgttaatcgcaccaagaataataaacactttcatctatttttctcccgccttttcgttaaagtttccaattcaatcataacccaacatcggcaaaattcaacgtccgccgtccgatgacacgagattgtcggattttttctttttgataagctggattcggtcaatcgctatcgccagcagcgtcccgagcacaagaccgttgcttaagagcgaaatcaggatcggatgcatccccgataacgcgctctccggcacaaacattacgccgacccccgtcaggagcgccagaccgataatggagcggattcgtttttgctccgctttctcataagagtcaaactccgtaaaggcgagaccggccatcgtggagaaaacgacgaagtttaccgcaaagccgaccggtgagggcagactcgcaaacgcattcataaatagcgggatcatactgatgatcacgacaaatacacttcccaaaagaaacggctttttcgaaggaagcttcgtcgtctcaataaaaccggccgcccctgaaatcggcacaggcgcaatgccccctgacagtccgctcaaaaggtggctgatcgaagccgcaaacccagccggacgctcacgccgtttcccgacggtgccgtcgaattttttcaccgccgcttctacaacccggatgctcgcgagcatattgacaatcaaaagcacggtaatgaagagtgatgtaataatcaggccgctgtcaaacacgggttttccaaacggaaaaagagccggcagctgaatcacgcggtccggtatttgaatcggtttggcagcgccgaagacggcgaataagatccatccgccggcaagcgaaaggagaatcgcatactgtcttaagaacgtaacattcgatcgggacatgatgaacatcgccgccgtcacaaccatggcgagcccgaatacaaggccgtcgacgctgttttttaaatagccgatgcccaaaaggcctttcacaatcggctgactcagctgcatgaccaacagcagcagatacacaccggtcacaaccggcgtaaacagcacggccagccgttcaatcactttaaaaaggctgaacaaaaagaaaaagacagcgcttaataacagcgccccctgcagcgcccgcagcgtctcgccgaatgtcgcaaacaccgtgccagtcagtccgccgtaaatcgtgtatacgccccaccataagcctgccgggctttcattaatcggcagacgatgtccctggagacattggatgaccgcggcgacgccaagcacaaaaaatgtgctctgaatcaatgcggcagaatcggcatggttcaagtgaaatgattgtgcgatggcgacaggaactacaatcgcagccgcaatcataaatgccgtccattgcaaacccccgagtatcagtttcaagtcaatcaacctctcctgttaaaaatcgaaaatggaatccccgtttccgtcttcctcacgttcgtctttcgcttttttctgatattggttcagcccggcgctgcccatcattttttcaagcagcagcgggtctgtcgaaggagacgcggaaggtttcggcgccgctttcggaatcggattctgcacaggcgccggagcggtgtgcgtctgagtgccgagcacgacatcacacagagagcggatggcggccgcgtgcattttgacctcctcggtgcgggtcgccgttttcgcctgcctcagttcttcttccatcttctgaatcaaagcagagatatgtatgttcatgagtaaatcctccagcagtaatttgtcttcttcctgcattttatcaaatttctgagcgaatcgcagaattgagtttgttattttttctgacggcataccgccctgaacgccaaaaaaggcgctttccgccgggcggaagcgcctcaaaaaaaccgtttattgcggcaggtcggggatgcaccaatcgatcggctgctcccccattttttcaagggcggcgtttgtacgggaaaacggtctgctcccgaaaaaaccgttccttgccgaaaacgggctcggatgagtcgattcaataataatgtgtttcgatgtgtcaatgcgctcttttttcatctgcgcgtgacgcccccataggataaagacaatcggcttctctctttcattcaccacatcaatgatgcggtcagtgagccgctcccatcccttgcctttgtgggaattggcctgaccgcggcgaaccgtaagcactgtgtttaacaaaagcactccctgctttgcccagctgacgagcgatccgtggttcggtacggagcagccgatatcgtcctgaagctctatgaaaatatttttcaaagacggcggctgcctgaccccgggctgaacggaaaaactaagcccgtgcgcctgtcctggcccgtgatacgggtcctgtccgagaatgaccgcttttacatcctcatagggcgtataatgcaaggcgttaaaaatatcatggctgtcaggataaatcgtttggctgctgtattcttgtttcagcatctctctcagctcttgataatacggtttgtcaaattcatctttcagctgattccaccagctgtcctttaaaagctgtttcaaactgtccgtcccccttatgaactgtgcagtcttgaatggacgggctttccgtcccacacaatgtcagtcggcgcctcccgcctcttcatgtccggctcttcaagaagaaccgcgaagtttttcgtcgggagctccccaagcccgtgcttttcgcttaaccggtctaagtaccgcttccgtttgccgccgagatccgcggactgattgccgcctccctcaaaaaacgcatatatgacgctcgcgcaaggaacacgcttcacacggtgctgtttcgcggcgcgcaaataaaagtcccagtcccaataattatggacatccggatcaaaataccctaacgtgtcatgcagagaacgtctgtacatgctgcctgacggaacgtacgtggaaaatacccgcatatccgcataatccgccgtataggcgaaaggctttcgtgacaccgggtatctcgtgccgccccgttcttcaaatgacacaatttccgcgtcagaatggacaaaatccgcatcagcaagtgcagccgccattctttccaaatggcccggcgtaatgaaatcatcatcatcgcacagcatgatgcaatcacccgacgcttttttcacacctgcgttccgcgcttccacatgtccggcattctgttctaaatcaataatctgaatcggcagatcgctgtacagctgcttcgcttgttcgaccgattccccggcatcatttacaatgatcacttcataaggctttatggtctgcatggaaatcgactccagcagctcacacaaagccggaatccgattatacgtgactatgacaattgatatattcatgatccgctccttctgctttttctcatgttctattaaaacataaagcggcgaagagatcaggggggatttttgatttcggcccattcagaaacaaatccaggtcatgcccgccagcaaaacgagaatgatcagaaggtctccccaaacagtgcataccgccttggcattaagtctgcccgcctccatggcgttccaaagttttgattgataaacaggcaccaacaccatcgcatagcttgtgcacaagcagacaaaagccggcgggacaagcgcacatccatcctcatgccaatcatgaatcagttccggtatactcaccccgctgtcaatgtacaagtataatatacccgccagcggaatgagcgaactgatctgcagctcgaaaagtttcaccttccactcacgcgcaaacgaaacggcccaaatccatcccagcgcataaaataatagaagaagcaaaatactgaaaacaacaaaaacagcgtcttgcatcccattcagaaccataataaaaagactcacaacgggcaatgcaagaaccaagctgcagacggtaaatacggttacggctatttgggcgcacgcgccgtacatccacgaacctaatctcattttaacacccctatatagattccctatgtatatagtgaaaaagatcaggcaagtctctgcctgcctgcgtaaaaacctatttttccgcaaaacggaaaacataccgtcacaacggcgcatactgccgcaaaactcggtgtgaccgccgaaggaaacagcccagccggaaccagattgaacaagaagacaaacataaaacatagattcggcacaattgaagcccataccgtccgctcagcaagctttttgccgccagccccgaactctttgccagcttgatagccgatttggaaccaatacagcacataaccgatcataatcagccatactgacacggaaatccctttccacagcgcgtcaacagcgggatgaatcctccacgcgtgcatcatcgtaatcatcgcccccatcacaaaaagaccgcagttgcagaacagataaaagagcataaaagtccgcgcgggcaccgccgaagctttttgaaaagcagagataatctcagacggagtccccacttcccgcagaataagcgccatcgcttcgctttcggttttgcctttttccagatgatcacaaatggcatgatgaatatggctttcgatttcttttaataattcacggcttccggacttgccttccagcccttttctgatttcctgcacataaaggtctttatccattctgcccgccccgcttcagcatccggtccatcagagcagagaacagattccattccttcgtccgttcggctagaatgttttttccttcatcggtgatccggtaatattttcggtccggccctttggtctgcttttcccagtaagaagaaatatagctttggcgttcaagcttatgaagcgatgggtacagcgtgccttccttcatttgcagttcattcccgcttcttttctccatttctttcacaagttcatacccgtacatgggccgttcattcagcagcgtcagcaccagaatgaccgtgcttccctttacaagctccctgttgagcatttattttctcacccttacctagtaatcttatgtaggtattgtacgcacatcccccgcggctgtcaaatcattcctccaagccttccgtattgtgatcggaagaaaatctaactataatgagatataaaacactgatggaggccattgatatgtcaatgcacaaagcacttactattgccggttctgattccagcggcggcgcgggaattcaggccgatttaaaaacatttcaagaaaaaaacgtatacggaatgacggctttgaccgtgatcgtagcgatggacccggagaacagctgggatcatcaagtatttccgatcgatgccgatacgattcgcgcacagctggcgacgattgttgacggaatcggcgtagacgccatgaaaacgggaatgctccctaccgtggagatcatagagcttgcggcgaaaacgattaaagaaaaacagctgaagaatgtcgttatcgatcctgtcatggtctgtaaaggagcgaacgaagtgctgtatccggagcatgccgaagcgcttcgcacccaattggcgcctctggcaaccgtcatcacgccaaacctgtttgaagcaagccagctgagcggtatggatgaattaaaaacggtggaagacatgaaagaagcggccaagaaaattcacgaactcggcgcgaaatatgtattgattacaggcggaggcaaattgaaacatgaaaaagcgatcgacgtgctgtatgacggagaaaccgcggaagtattagaaagcgaaatgattgatacaccttacacgcacggagccggatgcacattctccgccgccgtgacggcagaactggccaaaggcgctgaagtgaaggaagccatctacgcggcaaaagaatttatcaccgcggcaatcaaagaatccttcccgctgaaccaatacatcggaccgactaaacattcggcgatgcgtcttaacggaaaataaaataaatatccccctcattacccgagggggattatttcatttttttcgcggatgaccgcaaaaacatctcaatagactgcacaaacagcgcatattccttcatctgttcatatgtatgcatcagccgatcactccattcattgtgcggctcagctctcttgagcatgcgattcagctgaagcaatacttctttatattcttcccgcttatcttccacttgctctgcggctttgacaagtaaacatttcggcgtcatcttctgatttttcaaaactgagaaaacaactccttttattcctggaatcataggctttcgtttgaagaatagcacagatggcataggtttcacataagaaaaaagaacgattttctacaaaagtgtccaaatcgagccatttatttccgtttttcctgccgaagtgacggttacgtcatcatttcccgggaaaggaaaatatctggcgctgaatacctcttctccatcattcaaaaacaattcaatcgaggatgcatccagaaagagctgcacggaatgcacctcgctgatggcgcagcttctcttttctttttcttctccgctgaaagcggtgcgctccagcacagccagcccctcttcctgatgaaatataaaccgggccgcgccccgaattgagatttcaaaaccggattcgcaagtgatgtcctccagcagcacttcagcccgggacgcatctttcaccgggaggcttatagacgagcaattcaattgaagacggtgcttttgttcatccgtgcggcgtgatttcatttccgaaagcgggcgctgtatgattctgccgttggacagtgacagctgtctcggcatcgttaagcagtgaatccagtgatacgcatgggtcggatgtttgtcctcatgctgatccggaacgcccatccacgcgaacagaatcctccgtcccttatcatcttccagcgtctgcgccgcataaaaatcaaatcctctgtcaagctccgtaaattcaccgtgcttaaattctggcggctctgtatgcagcctgccgaggaaatagcccgcctggtggctgttatgatattttatcccgtcggcttcaagcccctgcggacatacgagcagcacgtcggttccgtcaagggaaaacaagtcgggacattcccacatataaccgaatgacccgagaccgccggagtccgctcccgcaatcgcaccgagaaacgtccaatccgtcaagtcctctgatgtgaacaacacagcgcttccggtgagtttttctgtctgcgcgccaagcaccatgtaatacgctccgtctttcttccaaaccttcggatcacggaaatgagcggtatagccttccgggagacgcgcgacaactccttttttttcaaatacgatcccgtcttcggatacggcgaggcattgatacgtttcccgattgccttctccgtcacggacattgcctgtgtacatcaggcagagccgcccgtctttttcgatggcgcttccggaatagcagccgtttttgtcataccactcacccggcgcaagcgcgatttcttcctctttccactcaacgaaatccttcgtcgtcacatgcgcccaaaatttcgcgccgtgccccgtatgaaatggctgccattgaaaaaacaagtgatatacgccgttccattggatcacgccgttcggatcatttaaaagcccgaccggcggcataatatgatagttctggcggtatggatctgacgcggctgtttctccccgcttctttttcgctttctcagcctgcaggcgcagctcttgatccggtgtcctcatttgacggtctccttttctttagctcccataatgtaagcggcaataaacgccgagacagaggcgatgcccattccgatcagatagtttataagatttcctaaaccgagcggagccgtgatggcaatcatcggaattccggtcagaccgtaggcattggcggcgacaccggtcaccacgacataggctccgcccagcgctccgccgatcattcccgcgataaacggcttgcggtatcttaggttcacaccgaaaatgactggttcggttacaccgagaaaagcggaaaatgcggccggcagagcgatttctttcattttcgcttttttcgtcaggaaaaatacagccagtcccgccgcgccctgagcgacattcgccatcgaccagataggaaggatatagtttctgcccaaatcagcgatgaggccggcctcaatcgcatgaaagctgtgatgcacaccggtaagcacaataagcggataaagaccgccgaaaagcagtccggcaacaatgcccgcatgatcatacacatatgtcagcgagacggtaatgcctgatccgatcgccctgccaagcggaccaattgcgataaaggtgataaatcctgtgacaatcaccgtgacaaacggcgtgaccaataaatcgaatgcgtgaggcacaatttttctcgtgcccttttccactttgctcataatgtaaacggctaacagtacggggatgaccgtcccttggtagccgagcagcgcaatgtcgaagccgaagagctgcataaaatcaggtgatgcatccgcaagcccccacggattcaaaagcgccggatggatcataattcccccgagcacggcaccgagataggcattaccgccaaattccttcgccgcgctgaacccgatgaatacgggcagaaagataaacgccgcgcttgaaaacatgtctaaaagcttaaacagcgatgattgttcagacacccagtgaaaagccttcatcatgccgagcagccccattaaaagtccgcttgccacgatagccggaatgatgggaacgaatatgttagacagtgtcttcgcaaatcttgcggccggattcagcttttttttcgctgcgtcctgatgtgtctcacgatcctcccgccccaaatcggcttcttttgaaaaagcgtcatacactttattcacgaggccggtgccgaatataatctgatattgccccgagctgctgaaagccccttttacgccttctatttcttcaatgccggcctggctgatcttctgttcatcttgaatgacgagcctgagccgcgtcgcgcaatgtgtcgcgctgatgatatttgattcccctccgatatgtttgataagctgttttgccgtttcttgataattcatgatgtatccccctttctaaaatcaaaaaagacctaaaattcgccaacgaaaaaggtcagcataatccctttttcatgtacgcaaattttaggtcttgcctgcattaccagtcacaatcccgccggattcagttttttaatgcgctttcattctattccatgatagcgctttcgtcaatatgttttcaaaaaaaaagtctgtttctcgaaacagacgcgttattccgggtttttttgcagacgctggacatgcagcgtgatatagccggcctcggattccggcagttccaaatcatattcagtttttaaaaacgccgccagttcaagcgcacaccgataagcaaacggatactttttttggatgaaataaagcatctcctcgtccatggaatggagtgcttcatttgagtccaaccggctgaccgcataccgtaagtgcgtgacgaggcgctgataggaaatactgtcttcatccaccttctgttcgaaaaaggattcgatcttttcgatcatttctttgatcatggttgtatgcttcatcgccgaatacatgcttttggcatccgccttggcagtgtggatatgaagcgcgatataccccgcctcatcatcaggcaatgatataccgagggtttgtttcacgtgttcaaccgcccagcggccgatctcatattcttttttataaagcgccttaatttcatgaagcaatcggttatgcacctgaaggccgttttgaatcctttcgatcgcaaaggataaatggtccgccagcgcaatgtggatgtgatcgctcaaaggtgccgcaagctctccctccgcatggctgatgatatcttcagccgcctctatatgctcttcgggaagcgtttctaacacttgtttgaacttttcattttcgtcgtgcacgacaaatattttttcaattttatgtttttgaatcacatcattttttctcttttgaaaagcgattccgggacccattacgatcttttcccgtccgtcttcttttattaacgccgcattgttatttaatactttgtctattctcaagaggttcgctcccgttcatatgtttagtgggattgtaccctctttttcatatgatgtaaaggtgccggacccgcgcgctcccgtttcggcaattctttgcggacaggcatccatcggtttttatccagcctgccgcgggccgatttcgtttcatcggtcaaatccgccgatcggacacggctcacaaacgaaaaagccccagccgtccgcttcgctttcttatgataagccgcttggtttccgtacacggcggctaatggatatcttccgttacccggcgccatccaattcatcagaaagaccatccacacccgtaaagatactagcaaacgtttcattgcaaatcatccctccgcttctttttgacagacagcttgttcgcaggcctgtttttctctccgctttaacggaaaaggcggccgatccttctccgctaaaaactagcgggtctagcaaccctatgactctatgatagacgcggccgggcgaattgtttgtcacaatatgagtgaaaaaacaaactagttttcagaagttttgttgaaagctgatggaaatgacctgaaaaatggaaaagccgataaaaaaagttatacacaccttatcccttggttaagcacagcttaaacacagggcatatccacatatccacaaactcgatctatattttgtataggaacactcgttcccaacaatatatatacacaaatttattcagttatacacaggattctgtgtataactccctccttattcacagaccaatttccataaatgagtcatatgacacaaggattattttgaattttcaagaaatatatactagatttctaatttagataaagaaaaagggggaaacacgattgaaaaaaggaatcatccgttatctgcttccggcttttgtcttatcctttaccttatccacaagttcacaggctgcgccggcttcaaaaccgcaaactcctgatcttgagaaggctgaggtgttcggtgacattgatatgaccaccggcaaacaaacgacagtcatcgtggagctgaaggaaaagtcactggcggaagcaaaggaactcggcaaagcacagacaaaaagcaagctgaaaagcgaacgcgcaaaagtgaaaaagaaagcgctcaaaaccattaaacacggaaaaatcaacagggaatatgagcaagtgttttccggcttctccatgaaactcccggcaaatgaaatccccaaactgctgagtgatcaggatgtcaaagcggtttatccgaatgtcacctatcataccgatcagctcaaagataaagacatcaccctatctaaggatgccgtgtctccgcagatggatgacagcgcgccttatataggggcaaatgacgcgtggaagctcggctatacgggtaaaggcgtcaaggttgccattattgacaccggtgtcgaatataaacaccctgacttaaagaaaaatttcggacaatataaaggatacgattttgtggataacgattacgatcctgaagaaacgccgtccggtgatccgagaggcgcgtcgactgaccacggaacccatgtcgcgggcacggtagcggcaaacggaacgattaaaggcgttgcgccggatgctacactccttgcctaccgtgtgctcggtccgggcggaagcggaacaacggagaacgtcatcgccggcatcgaacgcgcggtacaggacggagcggatgtcatgaacctttctctcggcaattctgtgaataacccagactgggcgacaagcacggcgcttgactgggcgatgtcagaaggcgtcacggccgttacatcaaacggaaacagcggaccgaacaattggaccgtcggctctccgggaacgtccagagaagccatctccgtcggagcgacccagctgccgctgaacgagtacgccgtgtccttcggttcctattcctcagcgaaagtaatgggctacaacaaagaagatgacataaaagcactgaataaaaaagaaacagagctcatagaggcggggatcggcgagcaaaaggattttgaaggcaaagatctgaaaggaaaagtcgcggtcgtcaaacggggcagcatcgcctttgtggataaagcagacaacgccaaaaaagcgggcgcgatcggtatggttgtgtataacaatgccccgggagaaattgaagccaacgtaccgggcatgtccgtgccgacgattaagctttcatcagaagacggcgaaaaactcgtcagccaattaaaagcgggcggcacaaaagcgacattcaatttatccgtggctaaatcgctcactgaacaaatggcagacttttcgtcacgcggtccggttatggacacgtggatgattaaacctgacgtctccgctcccggcgtaaacatcgtcagcaccattccgacccatgatccggccgacccgtacggctacggatcgaagcagggaacgagcatggcttccccgcatgtagccggcgcagctgccgtcatcaagcaggccaaaccgaaatggagcccggaacaaataaaagccgctctcatgaacacggcggaaaccttaacggacgcggacggtgacgtatacccgcataatgcgcaaggtgccggaagcatcagaatcatgaaggcgatcaaagcagactcccttgtcaccccgggaagttattcttacggaacgtttatgaaagacaaaggcaatgaaacgaaaaaagaaacctttacgattgaaaaccaatcgtccatcagaaaatcatatcagctcgagtactctttcaacggcacgggcattaccgtttcgggcacagaccgggtcgtgatccccgctcatcaaaccggaaaggtcaatgcgaaagtaaaggtcaatgccaaaaaagtaaaggcaggcacctatgagggaaccgtcacagtgcgagaaggcggaaaaacagtcgcaaaagtgccgacgctgctgattgtaaaagagccggactatccgcgcgtgacgtcaatcgacgtgcaggacggcacaacgcagggaacctaccaaattgaaacctatcttccggcgggagccgaagagcttgccttccttgtatatgacagcaatcttgactttgtcggccaagccggcatctacaaaaagcaggataaaggctatcaatatttcgactggaacggcaaagtcaatggtgacagcgcactgccggcaggagaatattatatgctggcctatgccgcgaacaaagggaaatcaagccaggtgctgactgaaaaaccttttatcattgaataaccgaacaaccctgctggagcatcagcagggtttctttctgatcattcggcaaaagcttcacgaagcagccggtatgactgaagtttatcttcaaaatgatgagtaatggttacagccatcacttcttccgttccgtatgctttactgagagccagaatctgttctttcacttgcggcttcgttccgatgatcattcgattccgattatcggcaattcgtctttgttcatacggtgtatacgtatttccgcggacggtttcgtaagacggtacgccgtgaagcggaatcccctgttcacccgcaagcagcgtataatccatgacggccgcgagttcctccgctttctcctccgtgtccgcgcacagcacaaacacagccacggccgtttttggttcttttcctaatgcggaaggtttaaatctgcgcttatattgtgctgtcgtgctttctccgccttctccattaataaaatgggcaaacatatagcctgctcccatttctgcgctcagaagcgcgctttcccccgaagaaccgagaagccagacttccggcgccgtcttaataaggggtgatgcggtcagattcggaaaacggtgattgtcatcagctgtatcatgcaaatacatcgccagctcacgaagctgctgcggatattgatcagcattacgcttcccgccgtcattcagcgcccatgatgcgatcggcattccgcccggcgctctccctaatccgagatcgattctgcccggcgtcaacccttcaagcacgcggaaattctccgccaccttatatgcgctgtaatgcggaagcatgacaccgcccgagcctacacgaatctcattcgttttcgccgcaatatggctgatcagcacttcagggcttgaacccgccaaccgctctgaaaaatgatgctctgacacccaaaacctcttatatccaagcttttccgcctcctgcgccagtcttactgtatcccgcagcgcgctttccgcggaactcccttctgatacaggagattgatctaatatgcttaatgaaatcatcactgtcacctcatcaacatcgtaccactgctaagccgttttttctttctgtatgcttataagcatccctgatgataaacatttatataccttgttccattttgtcgaaatatgttacacgtgaaacataaaaaaacctctcccggtcaggagaggttttttcttaattcttttgaaaacctttatcttttacatattgatttaaataggttctcggtttttgtttcatgaactgcaggatttgatcagaccacgtttcaacccgcttgccgtttgtccttttatcataataagcggaaatggtttcatcatattccttcatataactgcggaagtgttcttcattcgtatcgtatgtgttttcatgatatacggcttgtttcggcaggcgcggcttttgaccggacggatgagcgggatgaccgactaccaagccgaacagcggcagcacatggtcaggcgttccaagcacttccgtcacctgatcaagttcatttcgaatgcctccgatataacaaatgccaagtcccattgattccgcggcaacacttacgttttgtgcggcaagtgcggcatcaatgacgctgaccataaacatttccgtattctcaagaagctcggtaatgttttcgcctttttcctcagcaagttttttatgacggtacaaatcagcgcaaaacacaaacaagtgcccgttattttcgacgtaaggctggtttccggccagtgccgccagcttccgctttttctccttatcggttacgccgatgatggagtaagcctgcacgtaactggacgttgacgccgcctgggcgcttttcactaatgtatctatctcttctgctgtcagaagctcgtcagtaaatgatcggatcgaccgatgattaagtatagtttcgatggtattgttcatataaaagcctccttctctctatatcatatccgaaagggaatcatgtcaaaagcgaaatgctctaaacaaaaaaagacagcccgaaaaacgagccgtctcacattaagaattaaacaagtagcttttatatttcgtcagctgcacacttgcgttatatacgatcccgaagctgattaatgtagaaagcaccgagctccccccatagctgacaaacagcagcggaataccggtaaccggcataatgccgatattcatcccgatgttctggaaggtgtgaatcacgataagtgcagtaaatcctacgcaaaaaaacgcgccaaatcggttaaacgcatgcaagcggtcaatcagcaccacaagtctgtaaattaaaaagaaaaacatgacaaccgcaatggcgcagcctaaaaatccaaaactttcacccaaaatcgcaaagataaagtcggtctgtccctcaggtacgtacaccttcagattatgaacgccgtttccggtaatgccgcccgatccgatcgccataacggcctgatccacctgccagcttttatcgctctctgcctgagtcgttgccgcactggagtcagacatccacgatgtaatccggttaatttgataatccgcaatgccgattgaattcgccacatggggaaattcaatcacgagaactaagaaaaggccaagcacaagtgcggccgaaccgccgataatggtgatcagcttccagtttacacccgacataaacaccatcaccataacgataaacagacagatcgcacccgttccggcatcctgcaaaacgatcatcccgatcggaataaccgtccatgccgcaattttcaaaagcagattcacatcttcccgaagtgacctttgatccttcgggcccgccttcgatataatggacgcgaccatcatcataattcctattttcgtaaactctgaaggttgaagagtgaagctgccgattttaaaccagcttttcgctccgtttttaatcggcgcgatggattccggcgccacacgcaaaaggagcagcgacagcacgccggcaatcaatacgtacagactcagtttttcaagctgctctaaatcaaaatacatgatactgaccatgagaccggctccgatgacataaaagacgatctgtcttatccaggcatcacttccgtactgcccgaactgtccggccgcataaatcgccgcaacactaattattaaaaacacaccaaatataaaaatcaaatccccctgataatagggattttgctgtttcttatatcgactcattctatcccgccttacattttcatcggaagtcactattgtttattatacatgaacaccgttcaagaaaacatgatgaggttgcttcctttttattttttacggtttggggactacacgacatatgacgtgtcagaaaaggaaatgtttcggtcatgatgaaacttttccgataaaaaaccccttctcgtcagaaaaggggtttcagcttatgtttaacgtcataaacaagctgttcgggtcctctttataatgtgcaaacggatcacaatattgaaacccggctttttcatacaggcgtctggcggggagaaaagcctccatagaaccggtttccaagctgatccgctgatagccccgccgccttgcttcttcaagcatatggcggaggatccggttggcaacgccttttctgacatgatgcggagaggttttcattgatttgatctcaccgtgccggctgtttagctcctttaaggcaccgcagccgagcaggatgccgttttccctcgcactccaaaacgtaacgtcaggctgacgcagccggtccgcattgagcgcatgtatactttccggaggagaatgcatggtcatgctcttcagatgatcctgcaaaagcgcaaagacatccggcgctgtgacatcttctttccttacgtccacttcaaaccacccttgctgtgcatattttctttgaccatagcaaaggttcacagcctgcgccattccattgtccggaaatgtgacagggtatttggcctttccggtttcttgtacctatccaaaaatgaggcaatagttgcaatacatttctcgaaaaagcggtatcaaaaattggaaaacatggtataataattgtaacaaaatgttcaaaaaacgaccacaaaacagacacatttcattctctgtatttcattttggaaacgctcccataaaatgaaaggagacatgtaagatggacatgttttttgcttatttactggtcgcgagcgcaacacccctctttatctggctggataacaaaaaagtcgctctttcggccataccgccaattattctcatgtgggttttcttctacttttacgcaaccagcagcctatcccctctcggccacacactcatgatcatcctgtttgccgtcaacgtcatcgttgcccatatcgccgcctttatcatttacggccttccgcgcctgcgccggagaagaagccaataaaggcacaaaaaaccctcttcgcataaacgaagagggtttctttttattcctgatgttcggaatgatgctttgcaccgccaggagggtttccatccatatggtcaccgtgatggtagtgcgccgcaaagatccagatggaaccaaggatgataacaatcgctccgaaaaatccgaagagcgtgtttccgacttgaattccgccgttttcgctttctgtcatgtgcatgaacatgagaagctgaagaccggcttggataaatgcgaatccgaaaatgatccagagttttgctgatgggcttaattccgtatatactgcaacccaaagggccagcagggtcagaataatagacaacgcaaaacctacgatatgcttccacggaaagtggctgtgttcagcagatttgtttgccatattatagtccccccaatccgatgagatagacgcctgtaaagatgaagatccaaacaacgtctaagaagtgccagtataaacttgagataaagatttttgaagacgtctgcggcgttaatccgcgtttcttcaattgcagtaagatgccggcaatccagaagataccgatcgttacgtgcgttccgtgcgttcccagaaggacgaagaatccagaccagaaagcacttgtaccgagagatgctccttcatgtacatagtggatgaactcgttaagctcacatccgacgaagcccgcgccaagaagaagcgtaatgatcgtccaaatgacgacgccttttaaacttccgcgacgcatttcatgaacagcgatcccgcaggtgaaactgctgatcagaagcaggaatgtcatgatcatgacaagcttcacttcaaataattcagccggtaagactcctcctgctgttcttctttgaagaacgaagaaggttgcaaatagtgttgagaacaacacaatctctgcccctaaaaagatccaaaacccgagaatattgagtctgccggtttcagattgatattccataggcgcgttagaattgccgtgttctgcatgttccataaatcacgcctcctttattcggaaatctttctttccgtctcttttatttcttcaacaggtatatagtagccattgtcatattcaaatgaacgaagcaccatgcaaagcagaatgccgatcaagccgacaatgcccatccagaaccattcaaatacaagtccgaagcctgcaataccgaacgccactgacataataagcggtcttccggagttgtgcggcatatggattttcttgaacttgctttccggatgaatatccgttttgtcttctttcaattgcaggtacgcatcttgagatttcacttcaggaagcaccgcaaagttgtaatgcggcggaatcgcagatgaagtcgcccactcaagcgtacgtcccacgccccatgaatctccgctgatctcgcgagtagagtagcggaagctgtagtagatgttgtagcaaaggattaagaatccgacacccatcatgaaggctccgacagttgaaataaagttcaatgcagtccatccgtcattcggtccgtaagtgtaaatacggcgaggcataccttgcagccccaagaagtattgagggaagaaacatacattaaatccgatcataaagatccagaagaaccattttccgattctttcgttcagcttgtgaccgaacattttcggataccagaaaataaatcctgcgaaacatgcaaataccgtacccgcgatcagcacatagtggaagtgagatacgaggaagtacgtattatggtattgataatccgctgcagccatcgcaagcataacccctgttaccccgccgacaacgaagttcggaataaacgcgagcgcccacagcatcggtgttgtaaaactgatccggcctttatacatcgtaaagagccagttaaagattttaaccccggtcggaaccgaaatcgccatcgttgtaatcgagaagaaagagttaacagacgcactgttccccattgtgaagaagtggtgagtccatactaggaaactcaggacggaaatggcgataattgagccgaccatcgctttgtaaccgaataactgctttcttgcaaacgctgaaataatttcagagaaaataccgaatgccggtaagataacgatatatacttcaggatgtccccaaatccagaacaagttagcccaaagcatcggcataccgccggcttccagcgtgaaaaagtgagcgccgaacaaacggtcaaatgataacagcgccaatgccactgtcaaaacagggaaggcgaatacgataataaccattgtaatcagcgtcgtccatgtgaacatcggcatacgcatcagcgtcatgcctttcgtacgcattttcaggatcgtcaccataaagttgatacccgtcatcagcgtaccgataccggcaatctgaagaccgagcaggtagaagttctcaccaggcccgggactcatgtcgttgcttgccagcggcatgtaactcgtccagcctgcgttcggagaacctccgataacgaaagaaatattgaaaagcatcgcacctacgaagaacgtccagaaactcaggttgttcaagtaagggaatgctacgtcgcgcgcaccgatctgcaaaggtacgacaacgttgatcagaccgattaaaaacggcatcgccatgaagataatcatgatcgtaccgtgagtcgtaaagatctcattatagtggtttgagtctaaaaaactgttattaggaagcgctaactgggcgcgcatcatcaagccgtcgaccccgccgcggaacagcatgataacagcagagataatgtacatgattccaagtttcttatggtctacagacgtcagccattcagaccagagccatttccactttttgaagtatgtgagtacaacgatgatagcgatagtggaaagcgcaatggaaacttgtgcgcccagaattaatgggtcacctgttacaaaaaattcatcccatctcaatttcattcgggcttcctcctttcttgttcaatttcaatcttgtttatcgtcggatactttaaattcgtttttctttacattttcccacggatctgttttagagtgcggtgatacggctttgtagccaaggcgttttcgcgcctccatcgcatattcggcatcttggccgtggtcaacgtattttaagtgtgtagaagagaacgttaatttaccgacattctccggaagcatcagttcgtcatacttctctttcgtcagctttggagaatcgctttgggcttttttcacccagctgttaaagtctttttgcgtaacagcttttacgttgaatttctggtcggcaaagtgttcgccggtgaagttcgcgttgcggccttcatatgttcccactttgtcagcctgtaagtattgatccatcagcattcccgccatcgcgtatttttgtcccccaagctgaggaatccatagcgatgccattgaatcggctgaagaaattttaaataaaaccggacggtctacaggaatgttcaggtagttaaccgtctcaatatcctgctcagggtagctgaatacccatttccagtctaccgaagtagcataaacaacaagaggctctttatcctttgtcgcttcaggcgctttttctaacgaatatatcgtctgtacggtaggcacagaaagtgcaataacaattaaaattgggatcactgtccagactacttctaagaacgtgttgccgtgcatctcgggcttgtaatttccgctgtctttgcctttgcggtcgcggtatttcactaaaatgattgtaaatagtacgaaaacgacgccgacaatgaacagcataaatccgattgacaagagaatcagatctttctgctggtctgctacaggtcctttcggatctaaaacggaaatgtcgctgcatccgcccagtacgaaaacaacagccaacatcgctaataaaagtaacggtttaaatgctctgaacaagaagatcaccatccttcctattgatgtagtgaatctgaaatgtactttctcaaaatcttttctctatctaccttgttatgctatcaaaatctgcccttattagctttatttttttctaaagttcatctttttttcgacctaatgtcacaaaatcgtcaaaaaatgcatgaactttttccacttgcgcaaaccaaacataaaaagttttagatcatttagcatatatagagaaaaaagatagtgagaacgaataataccaaataaaggtttaccataataaaaaacgctggtcaacaaaaagtttcattttgttaaacattctacaaaagaaatattttttcctttgctcacaccttttcacacggtttccattttaacgcaatgcattgtgaaaaaaaagaccggaacgcgccttgatatgttcattataaaaaacacattcatatgtttaatatggacaaaacgaaggaaacatataggcataaataataaaaaataggaagtgatatttatgggttttatcgtatctctgattgtcgctattattatcggctggatcggaagtttatttgtaaaaggcagtatgcccgggggaatcatcgggtcaatgatcgccggtctgatcggcgcatggatcgggcacggactgctcggcacatggggtcctcaccttgccggctttgccatcattccggcaatcatcggagctgcgatcgtggtgttcttattcagcctgatcgccagaagcagaggataaaaaaaagcctcgtcccttatgggatggggcttttttccggtagagcgcccaaatggcggataaaccgccggaaagccgctctgccttcttctgtttgtttaaagacgccggcatgctccagtatccgcgcaaaggcatggccgatttcctctttcagaatctgttccgcgttttctttcgttaccttccgcttatgcagcacactgagcgcccaatctttatgctttgccgcagaagggtctgccgttaagaccgcttccgggtccggtgagcacagcgcttcagccgtgtatttcatttcttgttcaaggcggcccggcagaatcgcaagccccattacctcaatcagtccgatattttcttttttcaggtgatgaacttcctgatggggatgaaaaattcccagcggatgctcatcagaggtgcggttatttctgaggacgagatctaattcgaataaaccgtttctccgccgggcaatcggcgtaattgtattgtgcggtgtttctcctgaacaggcgaggagatcagccgcctcatcggaataaccgcgccatgcccgcaggatggcatccgccgcgccggaaagctcagacgcactctcgctttgcaggcggatgaccgacatcggccacttcccaattcccaacaccgttttcggatagtcaggcagcctataccggctttctgtctccgcccgcgccatcgggaattcataattgcccccctgaaaatggtcgtggcttaaaatactgccgccgacaatcggcagatcagcattggaaccgagaaaataatgaggatactggctgacgaacgacagcagccggtcaaacgtttttttgctgatcttcatcggttcgtgccggtctttcaaaacgatgcaatgctcccggtaatacacatacggagaaaattgcagaaaccactgctcatcgccgagaattaccggaatgacacgaaggttttgacgcgccgggtgatccggtctcccctcgtacccgacattttctttacaaagaacacatctcggataatcggattgaggctgctctttggcagcggcaattgctttcggatctttttccggttttgaaaggttgatcgtgatgtccagctttccgtaagccgtctcagccgtccacccgacattccgctgtattctgtccgaacggatataatacacatcctctgaaaatcggtaaaacgcctttgtcgcctgctccgatccgtgcaccgcctttgtttcttcaaaacgacggacaatctcggacggctgcggggcaaagcagcccatgatcttcgcgctcagcaggtcgcgataggtgtctgtatcggctgcaatccggcccgtttctgccgcccattcataaatcggggccaatatgtccggcaatgatgccgccgatacattttctttctgttctggaacctccggatgggtgatatgcaaagcttcatacaaacggtttctcgtatattcaatatcaagataggaaatcagctctttttgcaatccgtaccggattaaacgttccacgtgccgctcaattgccatcgtcatccccctttagttctctcgctccggctccgacatccgccgtgtaaaagtcagcttttctccctgtcttctcctcatagcgggcccctgccgtttcaataaaatccgaaaccgcatcgtccttgacgatactgaccgtacagccgccgaaaccggctcccgtcatccttgatccgatcaccccgccgtggcgccaggccgcttcagccagtgtatccagctcatgactcgtcacctcgtagtcatcgcgtaaagagagatgcgaatccctcattaattcaccgatatgatgaagctgattgttactgaacatgtcggcggcctctattgtgcggtgattttcatagacggcgtgtttcgcccggcgtctgttcacttcattctgaatcagctccgcatgggcgtcaaaagcggaaggggtcagctctcccagtgattgaacggaaagatgcttctgaagatcacaaagcgcttccccgcactccttgagcctcgtattatagcctgaatctgcaagcgttcgttttttattggtatttgcaataacgatcgacagccccgacagcccgagttttgtatattcaaagctgagcgtaccgcaattcagcagaatcgcatgatgtttctttcccattccgatggcgaattgatccattattccgcagctgacgccgataaaggaatgttccgccgtctgagcgagcttcaccaagtcgagcatatccgcctcaagctcatggcattccttgagaatgaccgccgtaacaagttcaatcgaagccgaagatgacagccccgcgccgttcgggatgtttccccagaacacaatatcgaagccgtgcggaagggaaaaaccgctgccgagacattccgccatgacccctttcggatagttggcccacccgtcctctttttgataacggatattatcgagactgcattcctttatgcccgcatctttaaaatgatgagagtacattctgacgagcctgtcccctctctcccggacggctgcatatgtaccgatcgtcagcgcgcaaggaaagacgtggcccccgttataatccgtatgctctccgatgagattcactctgccgggcgcaaagaaaatgcgcaggtcctccgattccccgaatacatcagcaaacgctttctttattgtgtgcttcatacgcatcccctttcaccattacactttcccccggggcgcggaaagaaaccgttatgacacgccctcttctttcgcttttctgaagacaatccacttgctggccgcatagttgacgactacgataatgacgttatcggcgattttcgccaacgtttcgttcatatgaaattgactgaccagaagaatcatcatggcgagatcgatggcgagagacaatacccgcacgctgaaaaaggccgtcaattctttcatcagactccgcatccccgcggtcttttgctgaaatacatacagtttattcgtgacatatgcaaatagaacggacagaatccaagcagcgacggtcgccgccttgtaatccatctcaaatgccgacgtcagaaagtaaaaactgacgatattcacgatggtcgtgaatatccccataatgatatacatcataatttctctgtagcgcatggcagttcctcgctttctgaaagacttttctaaaccttttgtcaaatcaagaagaacgttaccctgattttctgccgctgacaaaaacatagagcgcgtcaaacatgctgcggaaagtaaccggccttcccagcacattggattgcttaatcatcccgtcgatgagcgcgcacatcattttagcggtatgctcggtatctatatggtcttctattaaatttctcgatttgagccaatttatgtacatggtgctttcttctatccataacttataaagacggatataagcttcatattcactgacgactttgtaagtaggcatatgaacggcaaaagacacaacattccaggcaggcttgctgtttacaaaccgcatcaacagactggccgcgcttgccgcagcttcacaaagcgtcaacggccgcgctgtttgcttttctaattcatcgagatagccggtgatgatcctttttttaatctgacgcctgtctaataaatgcttcagaaaatcttccttgctttcaaaatgaacgtaaaacgcgcctttgctgaaacccgccgctttactgatgtcatcgattgagactgaatcgtaagctctttcaatcaggagacgaaggcctgcgtcaataaaactttcaaatgtttcttctctcttaatttgaaatttgttttttttcattttttaccccagctgtttgatcattcactttatcttacaccgaatcattcttttgcggtattttttatgcaaaaagaatatgctagtcgacgctttgagggtaaatattaataggtcatatgatttatttttatttgcatactatccagtcagtatttatttgtttattattatacgtaagaattcttgaaggattttggttatttcagtcattttcttagggaataggtaggtgaattcatcttcaatttgggattaccggccaactatgtgtgatatttgttatacattggctgctgtagctgggcaaatcaatttttcaattggaggttcttatgaaaactcatgtaatgaaagatatagatcaagattggcaattgttaattcaagaggctagaatcatgggtttgcacattgacgatgtgaggcgcttcttaaatactgaaaaagcggtgaagaaaaaaacaccaatgaaaaacaccatccgccagcggtaagattacaggcggatccttttactatatgacctgccacagtccgcccgcacccgagttttcaaaggaacagccgcaataagaggggaatcagagaacaaaccgtataccggacaaccattcccgtccgcattccgcaattgaacagccaaacatggtgatatgagatccccccgctgcatatcttgtgtatatgcccatttatgaggtgatacacagatggatacgaatccctattatgatgaaaaacaacagaactactacgaaggcctgaatccttatttattgaacaaaatagacgaaaactggcggacagtgcttgatgtcggctgcggcacaggcaatttaggagcggcgatcgaagaccgcggaataacggtttacggcattgaagcgtatcccgaagccgcaaaaaaggcggaaagcaaattgagccacgtgctttgcggcgacattgaatccgccattcttccgtacgaatcagaacaattcgactgcatgctgttcggagacgttcttgagcatcttatcgacccgtggtccgtgctgaaaaagcttcgtccttatgtaaaaaaagacggcacggtgcttgcatgcataccgaatgtcggccacatctcagtggtgctggagcttttagccggcaaatggacttacagtgacgccggattaatggatcagacccacctgcgtttttttacccgtgaagagacgctttcattatttaaagccgccggctatgaggtgaaacgcattgaggcgatccgcgttgatcacccctcttaccacaaagccatcgcagcattgcacgaagtatgcgtacagcttggcataaggcatgactttatgacagaagcatcggcgtatcaatatgtgattgaggccgagaggagcatgtaatggattcacattcatttctgtttgtcgtctgtgtgaatgacgagtcgctctactcccggtgcaagagccatatcatgcagcttaccgtccccccttcatactccgttgatatcatgccgatatacgattcagcaagcatggcctcgtcctacaacaaagcgctgagacacccctccaaatataaaatttatctgcatcaggatacctttatcattcatcagcatttcctacatgacatgcttcatatctttcaatctcatcaggagctcggccttctcggtgtcgccggctgcaaaaccctgccgccgaacggcatttggtgggaaagcggagagcggatgggaaaagtgattgaataccgggggaatgcttatcacccgctggactttgagcacggcaatgaagacggcctgtttacgcccgctgacgccattgacggcttgttaatggcggctcaatatgacgtggagtggcgggaggatttgtttcgcggctttcatttttacgacacatcacagtcgcttgaatttcaaaaacacggctatcaagtcggcgtcgcctgccagaaagacccttggtgccttcatttttgcggcgactcatttgacgccgcggcatatgaagcggacagacaaacatttgtcaaacactatatggcaaagccctctcgctgatcgagagggcttttttcgggttaacgtttattcagttcccgctcaatgatttgttcaaaggtttcctttcccgccgcgccagggattctctcatcgccgatgataaacgtcggcactgccgtaatgccggcttcttcataagcatggcggagcgcttcctgctgtacgtgtctgtatgctcttgtctcaagcgcctctttgaaggcagcgccgtcaagtcctgcttcttccgcaagctttgtcagcacgccaacgtcaccgatattttgttcttcctgaaagaacgcctgaaaaacgcgtgtatggtattcgcttcctttcccatgttcctttgcgaaatgaaagccttcaaatgccaaatccgtgtaaggatgcggtgacacgcgggggaacgtgatttcaacgcctaacgactgcgccatcggctcaatggagtttttccacatctgccgcttggcgggatcattcaccggatcaagtttcggcgaggggctcggacgcaattcaaacggcatccattccacctgtacgtccttgtccttgattgcttcttcaaacgccgctttgccgacaaagcaaaacggacatacataatcagaatatactttaatctgcagtgtcattgtaagtctcctttcctttttattttaagttgtaacatatgtagttacaagtgtttttttaaaaacaccctccatatggaaggtgtcacgattccagcagcctttgggcgatatattctccttttttacagccgccgggacaggcgaataaggaagagccgatcgtttgtgtgtattcattcagcgcatcctttgccgccaaagccttcagcatcgggacaaattggcggtccgggtctttttgaaagcagataaacagcaggcctgcgtcaacataacccgtcttcggatcaattccgtccgtataggaaaatgcccggcgcagaatctgtctgccggttgattttgccacgctgacatgcgagtcggcgggaatttgattcagcttcacgggatcggtttcctttttttgtccgaaaggcgcacccgagcttttcacccgcccgaacgtgtcctcttgttccttcaaggatgaacggtcccatatatctaaaaacatcttaattttcctaaacgccatgtacgtgccgcccgtcatccagtccggctctcctgattgaacccaaacgatcgaattcatcaggttttcatccttcgtgctttggttgccggtgccgtctttgaatccgaagaggttgcgcggtgtttccccgtttttcccgccgcttaagaaacctttattgagaaagcggacttcgcacacccccgatgcctgtttcatcaggttgcgcaccgcgtgaaacgccgtttgttcattatccgcgcagacttgtatgacgatatcaccgccgccttgtttcttatcgagcttgtcgttaggcatcggcggaatatcggcgaggtgcttcggttttttatctttcagtccgaagcggtccttcccgtctttctcgaaaaacccggggccgaagccgaaggtaacggtcaaattcgccggtgccagatcctgcgactccccggtatcctgcggaggcatatatttatttttctgttcgcccgacgggacggcgcctgaagtcagcagctgcgtcaggcttgtccattgtttgaaaagggagatgacatcggctttgtcgcttgacatgacatcaagcgccgcaaaatacacatacgtctgatgcgccgttgtgattcccgcttggtgctttccgtaaaaaggaacgatttgatcacgatcacgtttttcatcattctcctttgaagcggtggccgccggtttgaagagcggcgcgagtcctccgaggccgctcgctccgacagcaacggcggcgcccgcgacggcgctccacttcaggacatcccgtctgtggatctgtttttccttgttttgttcatcgctcatgctgcgtcttaactccttttaaagcacatcggcaatcttcgacatggtttcagaaagggccgtcagcttcgtgcttatctctctgatttgatctgtacttaatgtatcacaagacatatacgattgatcgcacgttttgtatttcgacatcaaaccttcaaattcgctgaattccgcatcaagtttttccgtgacctcgaaatgatctctcactgcgcgcttttcactgtttcatagagggcttttaagccttcggcgccggcaatgattggttcaggcatcactttgagcgaagcgatagagccgtcaaacacttcggtcgatattgcaagctgattgccctgttcttgacatacggcttatattctccaagtccgtcactgcctttttgcgcacacagaaaaagggccgtcctatcgggacagccctgctttggagcgctgaatttcctctgaaaacttccgcgccgccgcttttggatcttcggcttggctgatggcgctgatcatgctgacgccgtctgcacccgcttcaatgacgggcgccgcgttgtcagccgtaatgccgccgattcctacaatcggaatggtgatgccctgacgccgcacctcttcaatcaatgtaacgccctgcacggcttcagcatctttttttgtttcggtcggatagaccgggcccattccgacgtaatcggctccggcttcttccgcccgcttcacctcggagacgttatgtgctgacacaccgagtatcatatcgccgattgccgctctcgtttcttcggcgtctgcgtcatcctgcccgatatgcactccgtccgcctcaaggcgcaaggccaattcgacatcatcattaatgatgaaaggaatcccggcctgcctgcagacatcctgcacccgcttcgcgaacagaacacgttcctcccctgttaaagaaccgctccccttttcccgaaattgaaaaagcgtagcgccgccctcaatggcttttttcaccacggaaacggggtctgcgcttgtattgtttgatcccataataaaataaaccgataacatatccttcatcatttcccgagaaatacgcgtcatttttctgtcaccctttcaattgcggcaagctcggccgcttcttgttctgagatgcttgccagcttgtttaaaagctcaatctggaagctgcccggccccttatgggaggtgtccagagcggcaagctgagcggcgcttccgtatacagaaacggctgaaacggccgcttgcagaacgtcctgccccgctgcgcagaaggctccgattacagacgtcagcaagcatcccgcccccgtcaccttcgtcagcagtttatcaccgttatgtacggcgtatgtgtcggtgccgtcggagatgacgtcggtttttccggtaatcgcaatgaccgtcttcagcccgcttgcagccgtcttagcgagctgaaccacatctcctccggcttcccccgcatccacgccttttatcttccaatcaggggcgccggcaatattggcgatttccgcggcatttccgcgaatgacggacaagcggacctcctgtatgatcttgcgggctgatgccgtccgaaacggcgtggcgccggcgcctaccggatcaaaaatgaccggaacgccgttttcattggccgattttccggctgcgatcatagcttcaaccgacgccgaactgagggttcctatattcaggacgagcgctcctgcgattttcgccatgtcggctgcctcctcaattgcataagccataacgggcgatgcgccgagcgcgagcagtccgttagcggtgaagttcgtgacgacattattggtgatactgtgaacgagcgggttttgatcccgcactttactcaagtgttgagctgcggtttgtgcgtccatgcttaatcatccttttttctctttttcggattccataaatacgatttcgtatgctccagccaggctctggcggcaaaggacatatagcggtctttccgccaaatgatggctaaatgccacggaatgaccggatgaacgagcggaatggttctgactttgtcaggatcaagaccgcggcagattctttccggcagcaggccgataccgaggttggccgataccatttcgctgataaagtcccactgtgacgtttcataaatgacgtgaggcctgaatccggctttcacgcattccgtcataattcgattatgaaggacaaaatcctccctgaaaaatatgaacggctcttctttcaattcgtgaagactgcattctttctcgtcagcgagccgatgtgacggatggacgacgagcataagggtttccttgacgattgtgaacgtatgaaaaatctcttcatttgcgggaagcacgacgaccccgatatcaagcgagccgtcctccaccccttgctgcactttaatagagccgtcctcaacaagctgaaacgtcacatcgggatatgtgacgcggaagtcaccgagcactctcgggaaaaagccggacccgatcatcggcggaagaccgatgcggacgtgccctttcttcacttccataatatcgttcagctctgacgtcaggttttggaatgactttgtgatttcctgcgcctgcacatacatgctctgcccggcgtcagtcagttcaacttgccggccattgcggtaaaacagcttaatgccgagctccgtctccaggtttttaatcatttttgagattgtcggctgtgaaacatacagagactgtgaagccttcgtaaagcttttcaaacgggccacttccaaaaaatacgttaagtgccggatatccattacatttcatcctttctatagacaaaaggaatacacattattctttatatgtattttacctatagcaaaaccttctgtacaatataaatataagggaggcatcattatgaaaaaattgctgcttaccgttattcaaatcgctctgctgtttatatttgcgcgtctgatcaattgggtcacggcggctcttcatataaatattcccggcagtataatcgggattgtgattcttttcacattattgcatttcaagattatcaaacttgaatggattgagcttggcgcagcatggctcctcggtgagctgctgctgtttttcatcccgtctgccgtcggagtgattgaatacggagatattatgtctaaattcggcgtaagcattttacttgtcgtcgtcatcagcacatttgtcgtgatggtttcaacaggtacgcttacacagctgatagcaaaaagaaaggagaaaaaacaaacgtgttcatcggaatcataagtttattcttaactgtcttagtatatttgggcgcgaaaaaactctacactcgttttccgcgggtgtatacgtcgccgcttctgattacgcccgctgttttggtcgtactgctgcttcttgtcaatgtcccgtatcagacatacaatctcggcggcggactgctgaccgatatgcttcagccggcaacagtggcgttcgctatcccgctttataaatatttcccgattttaaagaaatacgccgtggaaattattttgaacgtagcggtcggttcatgtatcgccattctgtcaacggcctttatcgcgaaatggttccatctcggcagcagcttagtcgacagtctcgtgccgcgatccgtgacgacgccgattgccatgaacgtttcagaaatgatcggcgggatgccggccgttacagcggttttcgtcattttaacggctttattgggaacgatcatcgggccgatggtcatccgctatttccgcattgataacgaaattgcccggggcgtgctgctcggaactagcgcgcacggagcgggaacatctaaagcatttgagctcagctccgtatcaggaacgatctcaagcgtgtccatgattctcgccgcaattatgacgctgtgcgcggccccgattttgctttcgtttatgtcataaaagactgctccttacagagcggtctttttttatttgctatgaaggattgattcgtctgtccttcataaaatggcgaaaacacgatatgataagatatgaagtgaaaagactgaagaacggatgtgtcatatgaacggccagcagcgaagcagcatcagaaaaggacttgaagtcgatatcgtcctgaaagccgatcagcgttcaggaaagctgacaagaggaattgtgaaggatattttgacgaactcaagcttccacccgcgcggcattaaggtccgccttgaagacgggcgaatcggccgggtgcagcacattattgaatagaaaaaagccggagcttcacgcccggcttttttgtctattttttccgcaagaaaacaaccttcaaatagttcccttctttaaacgcgggaatcgttttgaaatcttccggaagcgtgtattcttccaaaatgtcgtaacgctcatttgtttctttaaaggcggtctctataaagcctttaaatttcttcatattgaaggcgctgctgtttgtcgaagcgacgatgatgccgttttttgcggtgatggcgatcgtttccttcagcagatttttataatctttcgccgcgctgaacgtccgtttttttgtgcgggcgaaagaaggcggatcaaggatgatgaggtcaaactccagcccttttttctccgcatagccgaagtatttgaaaacatccatgactttaatgtaatgcgcctcataatcaattccgttggcgctgaactgttcaatcgtttttgcgagactgcggttggcgacatcgacgctggtcgttttctcagctcctccaagcgccgccgcaacggaaaatgcccccgtataagagaacgtattcagcacccgtctgccgtttgcatacttgtcccgaatcgctttgcgcacatgacgctggtctaagaaaatgcccgtcatcgccccgtcgtttaaatccaccgcgtatcggatgccgttttcttgaacaatgaccggaaaatctcctctttcgcctttgacaaaatcgtcgtcttccacgtattgtccggcagtatcgaatcgtttcttttcatagatcgctttataagaaagctccagtccgtcaatcgcctcaatcatgctgtccttataagcgtaaatgcctttactgtaccattgaatcagcagataaccgtcataaaagtcaatcgtgacgccgccgatgccgtcgccctcaccgttgaaaagccggaacgccgtcgtgtcgggcgccttaaacagatgagctctcgcttcagccgcttttttcagcttgtccagaaagaaacgtccgtcgatccgttcatctctcgcgcgggacagcacccagccgactcctttattctgcaaaccgtaatagccttttccgataaactcacccttctcggatgtcacatcaaaaagatcgccctctgttagatgagccgagcttccggacagagcgtctttttcaatcagggggaatccttttttcagctttccggcaaatgtatctttcactgtaagtagcttcattgtgcattcctctttcgttttgctttctcttatcgtaccataaaacatgatcaacaccgcattgtcccgaaaaattcaaaacagggggaaaaccatgacagccaaaagaatcgaccatacaggcattatggtcaaagatattgaaacatccatcgccttttatcaagatgttctcggtatgcagttaaaggatcgtatcactcatacgaacggcattattgaacttgcctttctcggctttcaagaagggccggagacagaaattgagctgatccagggctacagcagcgagcttcccgcagaaggaaaagtccatcatgtcgctttattaactgaagatatcgcggcggagttcacgcatgcgaagcgtcagggcgccgtatttatcgatgaagaaatcacgacgcttccgaacgggtaccgctacttttacattgaaggacctgacggcgaatggatcgaatttttccagcgttaaaaaaaacgggcgaaagagcccgttttttttatgtttcttcagtgacgttttgttccgccgcccgttcctctctccatttttgaagatcccaaattcggaaaaacggataatagatgataaatgtaatcaggagattgatcagctgcatgaccgaaccggagattttcccgcccgtcgccaaataaccggaaatcagcggcggcatcgtccacggcacggcgattcccgccggttttgccaccatccccgtgctcatcccgatgtacgtcgccgtaatggtcaagagcggcgcaatgataaaaggcacgattaacagcggattcatgacgagcggcatcccgaaaataatcggttcgttaatgttaaaaatcgcgggcccgattccgagacggccgagctgtttcatctgtttgcttctggagcgcacaagcatggtcagcacaagggcaagcgtcgctccgcttccgccgacattaatccatatttgaaagaactgtgtcgtaaaaatgctcggcagcgcttctcccgcctgaaaagccaaacggttggcatccatcgccccgtaccagatcggcgacatgacgccgccgataatggacgcgccgtgtatgccgcacgaccaaagcagcatttgcacgaattcggcgataagacttccgccgagactcccgcccaaaatagacagcggggtgcccagcagatcgcctacgacattgtggaggcttttaaaaggagttatttcaataaacagacgggccagccatacaagcgtaataataatgaaaccggggatgagcgcaacgaacgatttgctgaccgcaggcggcactccgtcaggcattttaatgacgatatttctttgtatgataaaccggtacacttccgtagacagcattgcaatgatcatcgcgacaaacagacctttgcttccgagcagcgaaatcggaatgccgcctcccaccataatctctgttgccgagccgtcaggaataaacggaatctgatacggcgtcgccaataaaaaggcggcaagggcaatggctcccgacgacagggcatccacctcatagctttccgcaagccggtaggcaatcccaaaggcggcgacaagcgccataatgtcaaaggacgcattcacgggatacccgagcttttcaacccaattttcaccgaaaagaccagccataaaatcggcataaccgggaatcggaagactcgtcagaatcagaaaaaccgatccgatgatgataagcggcatagtcaaaataatgccgtcccgcaaagctcttaagtgcctttggccggcgacttttccggcgacaggcatgattttttcttccatgacccgattgaacgtactcatttatcaaaaaccccctttttgagttcattgcgcagatgtcttaaagcattttctccatcatattttggaaacgcttacatttgcatacagaaattttccttatccctcaggaaaaaaagaattccgcactgccgatatataaagaaaaagggggaattgcaatgtatcacaccctgaaaccgataatggccgcggccttgtgcgccggcctgttctccgccgcggcgcccgcgcacgccgagacgcacgaccgggacgttatcgtggtgtacaaaaatcaaaacggcaaggaatccgccatagacagcggagcggatgtggaacagacctatcagcatctcccggcagtcgccgtgtcagccgattcacaaacggtgaaagacctgaaacaggaccctgacatcttatatgtagaagacaatgtatcctttcaggcagcaggcggttctgatatccgcccgttatcagcggcccaaagcagcagttacgcgctgccgcaatgggatatagaaccgactcaggtcaagcaggcgtggaaagaaggcttgacgggaaaaaaggtgaaagtggctgtcattgacagcggcatttatcctcatgatgatctgtccattgcgggaggctattccgcagtcagctatacttcttcatacaaagatgacaacggacacgggacgcatgtcgccggaatcattgcggccaaacatgacggatacggcattgacggcatcgcgccggatgtccggttatatgcggttaaggcattagacagaaagggtgcaggggatcttaaaagccttcttaaagcgatcgactggtcgatcgccaataaaatggacatcatcaatatgagcctcggaactaacgcagacagcaaaattcttcacgacgccgtagacaaagcatacaaaaaaggaatcgtgatcgtagccgccgcaggaaacgacggcaacaaaaaacccgtcaattatccgggcgcctacagcagcgtaacggcagtctcagcgtcaactgaaaaaaacgggctcgcggctttttccacgaccggaaaacaaattgagtttgccgcacccggcaccaatattacgagcacgtatctgaatcaaatgtacgccacggctgacggcacatctcaagccgcgccccacgtcaccggcatgttcgcgctgctcaggcagaaatatcccgaggaaacaaatacacagctccggcagcagatgcagcaaaacgtcaaagatctgggcgctcccggacgtgacagccgattcgggtacggcctggtgcaatatcatgtaaagcaaaagagctatgccgaacggaccgtaataaaagcggaaaagacgaaaaaacaggcagatatcaatcaagcaaaaacggccgtcagcaagctgtccaagtcaaagggaaaaaccgctctcgagtcccggatcaataaagttcagacggcaagaaatgtgacggacgcaagagacaaagtccggactgccgaaaaacaaaagaaaaaaaccgccgtcaatgccgcacaaagcgccattcgcaaattaccggccggttcagagaaaaaagggctgcaaaagcggctgaacgctgtcaactcaagccttttgaaaacagctgaggccagcgtcaagcaggcggaaaaaaagacctctgaggccagcaccgcaaaagcccaaaaagcagtcagcgaaatccagccgggaaaagaaaaaaacgctctggaaaaacggcttggccggataaaagataaactcaaccggcagcaggctagagacaaagtaaaaacggctgaaaaaacaaagacgaaaaaagcaaaatcagcggcgcaaacggcagtcagccgattgaagccgtctgccgaaaagaccagcctgcaaaaacgcgtgcgtgcgattcgggtgaaatagcaaaaaacgcttatgagccggataacggcttcacaagcgtttcatcacacctgcctattggttcatggccgggcggtcgatcgtgttccatttcgtaaaggacatatatcggaaataatgatcacgatacgggtgcgaggtgcctgtattccaaggcttgtcgctgccgcagaaatggacgatggccggttcggcacgtgtttctctgtaacgtatacggtcgatcagttcaggaggcgttttctcgttcatgataatatgcgtctgcgcattccagcgcggatgcagttcatgccattgatcatataagatcgcgttaagcgcgtcctgatcatgaaacacgagaaaatcctccgaactgttttcgttaataaaatcaatcaccttttcggaaatattttgttttctccaaggttcgaaatctataatcataatgccggaattaaaatacttggcagtgtcgctgatattcatttttttcagcctttcatgctgtccggcgtcttctaccgccgcaactattgccggggaaatatccaagtcccataaaaccgaaatatcttccatcacaattgcatcgcaatcaatgtaaatcatccgctttacggactcatccttaattaaatcagggatggaaatgcggtaataagccgcttttgtaatgtggctgctttcgactgcatgcttgtattgatcagcgtctacttctaaaaattcaagcggcgtcccgaatgacatcgcggtctgttcaagcttgtccttgttttcggcagtaattccgccgtcaatcacatataatttcgcatcccttgttttatccatattcatcaataaagaagcgaacatcccacccaaatgacgagcataatgatcatcggcacatgatacgatatgcattgtttcattctttcccactgatattcatctccctttttgttgtacaaatgtctttccctttttaaaaaaagtaaacctcgatcttacacattttttctgcgggaatgtgctgtttgcgatttgatatcttttgcattctctgttcaaattcaatcaggatttcagcctgaatcatcgtcagaatatatcgcgcaggaaagcgaaaacacgtaaacataaaaacaaccagccggactgcacataaaagcggtccggctggttgtgatgcatcaattgtttaatcgacttctttcttaatcccaagcatcttttcgtctaaataatgggcaatgtccgccgcttccttcagctcgtcggtcagatgctttgggacttcgttatttaatttgtaataaattttatgttcaagactcgcccaaaaatccatggcgatggtgcggatttgaatttccgccttcacatattccacacgattcgtcaaataaacgggaatttcaataatcaaatgcaggctgcggtagccgttcggcttcggatgtttgatataatccttcacctttacgatcttcaggtccttatgctgcttcaaaacctcagcgacattataaatatcggaaataaaggaacagataatcctgacacccgcaatatcatgaatatgctctttcatttcctgcgtcgtcacatcgcagcctttgcgcatcagtttattgacgatactctcaaaacttttcacgcgtgattttgtatgctcgatcgggttatgcccgtgaatcagattatattcctggctgatgatagaaaacttcgtatccagctcatctaaagcgaatttataaactaataattcatttttccaatcttccatgaccgttttcaaatcatccatatgggctgttgacaagtccatttttttcatctccttgctttgctgtccatatatgagacgtgtcagtctgcggtcaggttctttacaatatcgtgaagattatgtcataaaaaaaaagcaaatgccggttatggcatttgccttttcatttgatcagcggaaataactgatcaggagtccgatggaaagcaggaatccgaagaatgtattggtttgcgccgttgatttcatcgcaataatcatgttcatcggcatttcgtttttcacaaagcctttcacggcctgaacgggtttcggcacgctcaggaagaccaggaacagccacgggcttgtgtaacccatgatgacaagaccgacgatccagatgtaagcgatggcaaaagatgcggccagtatcataacggcccctctatgccccatcaaaatggccagggttttacgtccgccctttttatcttcctcaatatcacggatattgttggacagattaatggctccgaccaagatggcgatcgggatggaaatcaaaatgctctgttcattaattctgcctgtctgaatgaagaaagaaataaggacaaatacagagcccatgcaaatgccggagaacagttccccgaacggtgtatacgcaatcggcagcgggccgcccgtatacagatagccgatcagcatgccggcaaggccgatagccgcaagccaccagctgctgctcatgcagatataaacaccgagcacgagggcaatcgcataagagccgagcgccagctgcagaattgttttcggcttcatgccgtgacgcacgatcgctccgccgataccgacggaatcctccgtatctaaaccgcgtttaaaatcgtaatattcattgaataagttcgtggcgatctggatccaaaggcaggaaaacagcatggccaaaaacagcaggaaatcaacctttacgtaaaacatcgccaatacggtgccgagaagtacgggcacaaacgatgccgtcaatgtatgagggcgggttagctgccacaaaatgcggcccatgctttctttctcgggcgtcttttggctgccccccatattgttttgattcattttcctcttcctttctattaaaaggctttcacagtcagccgataacagtagtgttgaattggggttttcacgttttctgctaccttatctatcataataatttcttcctcatttcacaagatgcggcgctttatcggctatcctgccggaaacggcttttcgcccttctccattggggttcggcacaagcctgcttaagaaaaagccgccaaaatttttttacctcgtttatatttacgataagttaaaaatcccgcctgaacagcgcctttttagtatgatcatttgccaatttatacatgcgtgttttccatccttttgtttctcattcatttttaaggaaattttaagcttaggatattagacatattttgaaactttttgttaatctaatcgtcatatactggtgtaattattgaatacgcggggaaggaattttgaatatgatgcaaaaattaaaacgtgcttatgaaaatacattgatcaaatggacgtttcatacgggcttttattttctgatattagtattgctcttttggatgtatggatttcatacagcgaataccggcacttatatttacaacgatttctaatcggggaggataactatgaaactacttgatgctataaaaacatacgcagacgccaagccgcaggccgaagcgtttcgttccttagatcattccctcacttacggggaattatgggatttgtcggagcgggttgcgtccggcattcaaaaacatacagctgacggttcgaaagcgcctgtcctggtttacggacatatggagccgaatatgatcgtttctttcttaggaagcgtcaaagcgggccgcccttacatccctgtcgatgtttccattccggcggaacggatcgtcaaaatcattgaaagctcaggcgcagagctgcttatcagcgtatcgggcgatgcagtcgatacgggaagcaatctgattaaaaccgttacgcccgaagagcttgcagctgacggagatgcagacctcagccgtgagaactgggtaaaagagctggatacattttacattatttacacgtccggcagcacgggaaatccgaagggcgtgcagatatcggctgataacctgcaaagcttcactgactggatctgcagggattttcctgtgggcgggggtaagactttcttaaaccaagctccgttttcttttgatttatctgtcatggacattttcccgtcgcttcaaacgggaggtacgctgcactgcgtaacgaaagacaaaatcaataaaccgaaagtactatttgaagagctggagaaatccaaactgaacgtctggacatcgacgccgtctttcgtccaaatgtgtctgatggaccccggctttacgcaggagctcctgcctgaggcagaagtatttatgttttgcggagaagcgcttccggctgccgtggcacaggagctgttaaaccgttttccgaaggcccgcgtattcaatacatacggcccgactgaaacaacggttgccgtcacctccgttgaaattacgcagcagatcatcgatgaaaatgaatccctgcccgtcggttttgcaaaacccgatatggatatcttcatcatggatgaaaacgggaataagcttccggacggagaaaaaggggaaatcatcatcgcgggcccgagcgtaagcaaaggctatctcggagaaccttctctgacggaaaaagcgtttttcccgatcgacggccagtgggcatatcacacgggtgatgccggttatgttcaggatggtcagattttctgccaaggacgccttgatttccagattaagcttcacggctaccgcatggagctggaggaaatcgaagtacatgtaaggcagtctcaatatgtgcgcacggcggttgtcatcccgtatcagcctaacggacctgtcgaatatctaattgccgccatcgtgcctgaaaaacatgattttgaaaaagaattccagctgacaagcgccattaagaaagaactggccgcttcgcttccggcctacatgattccgagaaaattcatttatcaggatcacattcaaatgactgcgaacggaaaaatcgaccgtaaacgcattggcgaagaggttcttgtatgacgccttacagctcgtttttcttctttatcttacttggaatccttcttttgccgacgattattttagggctgaacggcaagagattccaaggatacaacatgtttatatccatcatcgtattggctttgattttcgcgcatgatctgcacggcgtgatcgcactatgtatctttacgctgtggcaggtgcttttaatcaggggttatctcgcttacagactgaaagccaacagcggctttgtcttcagtatggccgtgatcgcgtccattttacccctgtttttatctaaattatggccgtttttctttccgccggcgcctcatcacccggttcataacctgatcagtttcttaggaatttcttatttgacatttaaaggcgtccagctgatcatggaaacgagagacggactgattaaagaaaaaatgccgcttcaccgccttttgtactttattatgtttttcccgaccatttcttccggtccgatcgacagataccgcagatttgccaaggacgaacagaaagtatggacaaagggagaatacgctgatttactgtataccggcattcataaaatttttatcggtttcttatacaaattcattatcggatatgcgattaacacgtatttcattatgaatctgtctcatatcacccacagcaaactgtggggtaatgtgctgtacatgtacggatacagcttgtacctgttttttgattttgcgggttacacgatgtttgccgtcggtgtaagctatatcatgggtatcaaatctccggaaaactttaataagccgtttatcagcaaaaacattaaagacttctggaaccgctggcacatgtccttatccttctggttcagagactacgtatttatgcgctttgttttctggatgacaaagaaaaaatggataaagaaccggatggccgtctcgaacatcgggtatttcctgctgttcatgctgatgggcgtctggcacggactcgctctgcaatatattgtatacggcctgtaccacgccgtattaatgaccgggtataacttttttgagaaatggaataagaaatacaagtggctgcccgccaatcgttttacggcctttttagccatcgtcatcacattccatttcgtatgtttcggattttatattttctcaggaaaaccatttcatcactaaaggagattgaaaacacatggaatttaaacaggaagtattagacgtattagctgaagtttgtcaggaggacgctgtgaaagaaaatcctgatattgaaatctttgaagaaggactgcttgattctttcggaactgtagaactgctggtcgccatcgaaaaccgcttcggcattacagtgccgatcactgaatttgaccgtgacgagtggaatacgccaaacaacattgtaaacaaactgactgagttgaagtaaatgaaaaagcgtttctttggaccaattattttagcgttcgtcctgtttgtcggagctatcgcagttccggcttcatggcttacgcgcttcattcctgaaaaacgtgtcgaagagtcggcggcagccttaaatccgaatatgttccagggactctatcttcaaaacaaaatgttcgaagactcgaagtatctgccgattttcggttcttccgagctttcaagactggatgagtttcacccgtccaactatttccaagtgaacaaccaaggctttacgccttatcttgtcggaaaaggcggggaccaatccttgatacacgccgtgaactttgcggcgcattatcagcagctgaaaggcaaaaagctggtattcattgtttctccgcaatggtttatcaaaaaaggttctgatgaacagcactttgcgccgaatttttcatcacttcaggcattggatttagcatttaataaccagattgatcccgcggtcaaaaagaacatgatgaagcgcatgctccgttttaaagtcgttcagcatgatgccgtcctttctgaattgtacaagggaatggtcaacggacaatcatggaaagtgaaagcggtcatgccggctgccaaagcttattattctctgcttgagaaaaaagatctttattattcaatgggagaaaacaagggccctgaacggacgatctctgaaaacctgaaaggaaaatcgtggtcagagttaaaaacagccgccgctcaattaggagaacggagctccaagtccaatcctttctatatcgatgacgcttcttataaaaagattaagaagaaagtaaagagagtgaaaggaatcaacaaaggaagaacatacgccaaatcagtcgaatatcacgactttgaggatatgctggacattctgaaagatgccggcgctgaaccgatgttcgtggttattccggtcaacggaaaatggtatgactacaccggcttcccgaaaaaaggccggactgattactacaaaaaagtcactaagcaaattaaagcgaagggctttcaggttgccgacttatccgggcacgaatatgatccgtactttatgaaagacaccatccatatcgcctggaagggctgggtgtacgtcgataaagcaatggagcagttttacaaaaccggcaaggtgacggttcactgagcacggtgatgacagaatacgtaaaaacgaacacgcagggggcattctctcccctgctttttatgtgatttgattttttcacaaatttgaggaaaactattgcgaatatttgttgaaggtatacaatagaatataaattattttcaaataagtttgacaataacaccaatagggagacagaacaatatgaaacaagacattcgtgttgaattgacttcagccaaaaaaccgaaaccggacccccatgaccttgcgttcggcagaattttcaccgaccatatgtttgttatggattacgacgccgatcaaggctggtatgatccgagaattatcccttatcagtccatctcaatggatcctgcggccatggtttatcattacggccaaaccgtttttgaagggcttaaagcgtatgtaacgaaggatcaggaagtgcttctgttcagaccggagaaaaatatggaccgcctgaaccagtcaaatgaccgcctttgcatcccgctcattgatgaagagcttgttcttgaaggcctgaaacagctcgtagccatcgacaaagactggattccgaaagcggaaggcacttccctttatatccgtccgtttatcattgcgactgagcctttcctcggtgtagcggcatcccatacgtacaagctgtttatcattctttccccggtcggctcttattacaaagaaggcattaaaccggtaaaaatcgccgtggaaaacgaattcgtgcgcgccgtcaaaggcggcaccggaaacgcgaaaaccgccggcaactatgcatcaagcctgaaggcgcagcaggttgcggaagagaagggattttcccaggttttatggcttgacggcattgagaaaaaatacatcgaagaagtcggcagcatgaacatcttcttcaaaatcagcggcgaaatcgtgacgccggagctgaacggaagcattcttgaaggaattacgagaaattccgtcatcacccttctcaaacattggggactgactgtgtctgagcggaagatttcgatcgatgaaatcatccaggcgcatcgtgacggccgattggaagaaacattcggaaccggtacggctgcggtcatttctccggtcggcgaactgatctggaatgatgaaagtcttgtcatcggcagcggtgaaaccggagagatctcgaagaaattgtatgataccattacaggcattcaaaaaggcgcggaagccgacgtgttcggctggacgacggaagtcgcctcactaagcgaatcaaaataagcaaaaaacccggaatcgaatccgggtttttttactgctcttatgcttcaatcgacttaaagaaatgaggcagatgttctttgtgggcctcaagcatttcatccagaatggcctttgccacggagtctgacgggacgagagggttgatcgtcatcgcaagtagcgccgtttgataatctcccgtgacggctgcttcagcggcgacgcgctcaaatgatttgatttgctggacgagtccgcggacagacaccggcagatcaccgacggcgatcggtttcggaccgtctttcgtcataacacagtttacttcgaccgctgagtcattcggaatgctggcgatcgcgccgttgtttatcgtattgacgggctggatatcatgtttgtcgttatagatggagctgatcaggttgcaggccgcgtcactgtagtacgctccgccccgtttttcaagctgcggcggtttaatggcgagattcggatctttgtacagttcgaacagttctttctcaaccttctgtacgacctcggcgcgtgtgccctccgtctgtgacgcttctatttcatgctcgagcatttctttcgttttgaaataatagcggtggtagccgcaaggaatcagatcgagcgccttcaggaattcaggctcccattccgcccctgaaatatttttcatcgtcatggcgttttccgggtctcccatggcttcaatgacttgatctttcacgctgacgccgtctaagaaaacatctaatccgaagaccatatgattcagcccggcaaattgcacttcgatccggctgacatccacgtccaatgcttttgcgacgcccattttaatgccgatcggcacattgcagaggccgacgacttttgtgagattcgagtagcggagcaaggcctcggtaaccatgccggcagggtttgtgaaattcacgagccatgcattcggacaaagctcttcgatgtctttcgcgatttccagaataaccgggatggtgcgcagccctttgaataaaccgcccggaccgtttgtctcctggccgattacgccgtattttaacggaatccgttcatctttggcgcgggcctcaagaaggccgacgcggaattgagtcgttacgaaatccgcatccttcaaggcttctctccggtcaagcgtcaggtgaatctctatcggaacacccgctttttcgaccatgcgttttgcaagcgtgccgacgatattgagttttttctcgccttcgggaatgtcgacgagccataattctctgacaggcagttcctcatagcgtttaatgatgccttccacaagctccggtgtatagcttgagcctccgccgatcgttacaattttaattccttttgtcatattttcgctcccccttgcagactcactttttcgtaaatctcaactaactcagcggccaagtctttcacggtcatggcattcattaaatgatcttgcgcatgcaccattaaaagcgtcatgtctgttttttctccgccggcttcattttggatcagttctgtctgataatgatgggcttccgtcagttcccttgcggcttcctgaagcttttcttccgccatggctctgtccccccgctttgcggcggcaatggcttccattgatgcgcttctgccgttgccgccatgcaggatgatctgaaaaatggtctgttccattttttcattcatgtgtttcactccctttctctacagcacggctttttcgtctccctgtacggctggcgcctgcgattgttcaagttcgttttcttctttcagcttttgcgaatcccacattctgaagaacggatagtacacgataaaggctgtgatgatgttaatcgcctgcatgacagcccctgatatttttccgcccgtggcaagatagccggagaaaatcggcggcatcgtccatgggacggcaatgccggcaggtttggcgacgaggccagtgctcatgccgatataggtaaggaccagtgtgacaagcggtgtgataatgaacggaatgagaagcatcgggttcatgacgatcggcattccgaaaataatcggctcattaatattaaagacggccggcccgatggcgagtttcccaagctgcttcatctgcttgcttcgcgaacggagaaacatggtgaccacgagcgccagtgtcgcgccgcttccgccgatgttgatccagatttcaaaaaactgctgggtgaaaatattcggaagcgcatcgcccgcctgaaacgcaatccggttggcatccatcgctccgaaccagatcggcgccatgacgccgccgactatgttcgccccgtgtaatccgcacgcccacaagagcatttgaaccgcttcggctatcaggcttccgccgagacttcccccaagaatcgagagcggtgtccccagtacaacgcttacaatgttatgaaggctttcaaacggtgtcgcttcgacaattaaacgcgcgccccagatcagaaagatgacggcaaaaccgggaattaaagcgataaacgatttgctgaccgcaggaggcacgccgtccggcattttgaagacgaaattccgctggatgatcaggcggtaaatttccgtcgacagcatggcgatgatcatcgcgacaaacagccctttgcttcccatgagagacagcgggatgccgccgccgaccatgatttcctctttggcgccggaaggcagaaacggaactttgtacggcgttgccaagagaaacgccgccaaagatatcgcaccggccgataatgcatccaccccgtatttttcggccaggcggtaggcgattccgaaagcggcgacaagacccatgatttcaaaggtcgcatcaaccggatattgcagtttttgagaccaggcgcttccgaacgtctttgccatgaaatccgcatatcccggaatcggcaggttgccgatgatcagaaaaaatgaaccgatgataataagcggcatggtgaggatgatcccgtcacgcaatgcttgcagatgccgctgggaggcaatttttccggcaatgggcatgactttctcttctaaaaactggttcaccttattcacacggcccgcccctttctacgatgcgtttccgagctgttccgctgatttcagaacctccgctccgttgcatgtgccgtaatggacggtattgatgacttcaaccggcactccttttgattcacccaattttttcagctgcggaagcaaataacggacttgaggcccaagcagcaatacgtccgctttatcaatatgctggttgactgaatcgcctgacaccgcccagattttatattcttttccttgttcctgcgcgcttttttccatcttggtgacgagtaagcttgttgacatccctgctgcacaaacgagtaatatattcatgtaaaagacctcctgatagtttgatattttgtatgtctcgatgttagtaccatcatattatgaaatcgctttcataactactcaggctttttccgctgttaacggaaaaaaggtgtatcccggtctttctctgatcgtttgtctctgaatactcgtaaaacctcctgataggttgtgcattttaagagacggcttaccgcggccggatcatctaacatgccgccgagccatttgtacatatgctggaggtcggctttgctttctttctcgacgcagagcaggcagacaaattggacacgcttatccgcccagtcaatcggcttcttcagcgtgcataccgcccaaaacgtcgtgtctgtctgcggaacgagcgggtgcggaatcgccgtaagattgccgaaactcgtaggagaaatcgtttccctttcaaaaatagaatcggtcagagaatcagaagcgaggccggcttctgcaacctgctgtccgagaaaacggatgacgtcctccttcgtctccagatcctgctgcaaaaataccagctccggtttcagaaagttcaattgttcccgcttttcttccagcatggcgtcgatttttgtaaaatccccgccgcccaacagcgtatgaacctttaatacgggaacgggcaggtcttttttgatcggaactgtgctgaccacaaaatcaatcgactcaaaggaaagctggtcaaggctgcagtaatcagccgttccgacgatttcaagacgctttgcgaaccgggaacggagcttttctcttaaaagctgtgcgctgccggcgccggacgcacagacaatcaagcagcgtttaggcggccgttccgtctttctcctttcaatggcggctccgaaatgaagcgccaaatatccgatctcattctcatgaatatcaatgccggtttgctccttgatcacgattcccgcaatcactcccgcttcaaatgcgagcggataattttcctttatggcggagagcatcgggtttctcaggttcattccgtaccggtttcggttaatcgccggcttgatgtggagcgcaagacccgctttcagctcattgtcgtccgtgattccgagcttcagctcccgctcaatggcttcaatcatggcctccgtcaaacggctggtttccccgtctatcagccttgtaagctcttttccttccagttgtgactgggtcatgcgctttgtcccgagcaggtgaatggcgatataggcggtttcctgttcgggaaaggtgaccgaaagcgccgattcaagctcttttacgatggcttccgctgactgatattctgtttcaagcttaatatcatgaagatcttccggaatgagagatacatagttttctgtccggattcgtttgcaggcaatggcgatatggatgatgagattgttcaggccgaagaaagaaagcgggatcttatggtttcgaacctgcttcataatggctgtgcggatcacatgaatgtcgtctttcggcagaataccggccttttcactcaggagatcaggctcaggctcgcggtcgtccactaagtattccgccatacaataacggaggcggagctcttcgccgcgcagcttaaagccgtagttcggccttgtttccaaaatgatgtcataggggcggagccgttttttgacttcttttaaatcagattgaagtgtggatttactgatgaacagttcttccgccaagtcatccagcttgaggtagccgtcggccagaagcattcttttcataaggtaatctatccgttcatcgggaaaaatcggcacggtgctgttctgctggaaattgtcctgaagccagtttttaaacggctgctcattccggatcagcagcttatagccgctccctctgacagattgaatggatgcgccgtgtttttctacaatggtttgcagttcctttatgtcattgcggaccgtccgcgtcgttacctttacatttgcagcgatgactgagcttgtaaccggtgtttcagcagctaaaagcaagcgcagaagttcacgaagccgcccatgaagcatgagaaaaacctcctatcagatcagatgcagacgtgaaaaatgggcaaaaagaatgaggaaggggtaaatgtatgtaaattctataatggggaggatttcaagtcaatgcggcaatccgatgccaagcccgtaaaaaaacagccggatcagccggctgttcgggatgcggacatgcggttccgcttagatgccttccgttcttttatgatttttctgatgatcggatagatgacgggcgcccatttgataatcgttttgaaaaattttttcaatgtctgaatcccctttcttttaccttgtctttcccctgttatcagcgtttataaacatggtcagcgtgagacataccggttccctgtcacccaatagcgccacggataatcccgggcttctccgctgttgtcaatcccgattctcgggcctgttgatatatgctcaggcgtaaagccctccgtaatatacagcggcggttccgtgatcatgccgccgtagtcgttcattgaaatgcccatcgccttcgtcagttttcccgggccgtttgtccactctctcgggggtctgcccggtctcctgctctccatcaggaactgtccttcatgaggctccgccgccctgattaacacggcctgcggaatgccgatgtccgcggcgacgacgtttattaatgtatgagtgtgcatgacgtatgtataaatgcggcccgcctcatggaacataatttccgtccgtttcgtgcgccggttgccgaagctgtgcgccgcccggtcttccgctcccatataagcttccgtttccacgataaaacctgaagccgttccctcatccgtctctttcaccaaaagacagccgagcaataaaggggcaagctccactgacggtctctggtaaaattcaatcggcaaaggctttcgttctcccgccatttgcctccctcctttctgaatatagcgatttcctctttcacgtttttcacttcttttttacaatataaacatgagagaaaaaaaggacattattgttgaacgctctattgcgttttgaaaatcggctcggtataatatgatggttcaaatgaaaatgattctcatgttcaataaataccggacaatgatcataaaagtaggtgaattgatttttgagcgattctgtcaggtccgcaaaccgtctgatcagcatcttaaaaaacggggttttcttcctgatcgctgtgatcgggctgcttgtatctatttttttcgccgtctcattcggtgcgaaagacattactttacatacggtttggtcggctgttgctgattacaatccgaatataacgggccagcagatcattcatgaattgcgtcttccgagggtgctcggggcggccgttacaggagccgcttttgccgcagccggcgccctcatgcagggtgtcacgagaaacccgcttgccgattcgggtgtcttaggcgtaaacgcgggcgccatgtttgttgttgcgctcagttttgcttttttccctcatttgtcatacgccctgctgatggtgatgtcatttttgggagcactggcaagcaccggcttgattttctttatcagtgcggcgggaaaaggcagcatgacacctttaaaagtaacgcttgccggggcggtcgtggccgctcttttacattcactcagtaccggtgtggcgatttattacgatttaagccaggatttggccttctggtacgccggcggggtgtcagggatcaagtgggctcatttacaagtccttgttcccgtgattgcggtcttcatcattctcgcgacattcatgggccggtccgtcacccttctctcaatgggaaatgacgtggcggcgaatttaggggtgaacacggctctgacgcgtgccgccggattaatgatcgccgtcgttcttgccggtgtgtctgtttccgctgccggcgcgatcggcttcgtcgggctggtcattccccatatcgcgcgaaagattgtcggcgttacgtacaggctgattattccgatgtccgcgttactcggcgcgattctattgattttggctgacctggcctcgcgcacggtcagtcccccgagggaattggcgataggcattatggtcgcacttgtcggtgtccctttctttctttatattgcccgcaaggaagggagagacttataaatgaaagtgcagaaagaaacaaaaaaagcggcggcggcaggactcattctgctggtcatcgccgtttgcattattctgatcgggctgcatacgggctcattccggctttctcctctcacggtgggaaaaacgctgttcggatacggcacgtttcaaagcacaaccgttttattcgattaccggcttccccggattctggtgacgatgctggccggcatcggtttaggagtgtcgggcgctattttgcagggtgtatcccgaaatccgcttgccgatccgggcattctcggactgcatgccggcgcttccttcggtttgatgatgtatatcacgttctttcattccctggaggcgcaggcgtcgatgttcatcccgctgtttacgtttgcgggcggaacactcgccgccctgctgatcgtagtgcttacgtacgacaggctgaacggttttttaacgatccgcatgctgttagtcgggatcgccgtttccgcgggcttcagcgccgttacattgtttatgtcgctgcgcctgaatgaagaaacttatacattcgcttcccgctggctggtgggaaacgtctggggcagggattggattcacgtgtggtcgctattgccctggatcggcattctcgcaccgcttgcatggcttaacgcccgctctttgaatattttaatgctcggtgaccaggcagccgcggggctcggcgcacacgtgcagagaaaaaggatcatgctgatcgccatagcggtcggcttgtcctgcgcgagcgtcgcgatggccgggggaatcggctttatcggctttgccgcccctcacttggcaagacggctcgtcggcaccatgcatcagcatattatcccgattgcgggattaatcggacttgtcattcttgtcgcggcagacaccatcggccggtcattgtttcagccgaacgccattccggccggcgtggttgcggcagccatcggcgcgccgtattttctctatctcgtcatgaaaatcaaatcataaaacaaggagtattcccatgaaaaaaataattgcgctcatcagtttcatgtgtattttcttattggctgcctgccaatccgattcaacacagccggagtcaaaaaagaaatccggcgatcataaaatcgcttcgatgtccattcacctgacaaatgatctgctggctctcggcgttacacctgccggttccgtcgtgggcggagaattaaaagattttctccctcatgtgaaaaatcagctgaaagacacgaaaaaactcggacctgcctcagacccggatatggaagctttacttgagctgaatccagacaacatttatcttgataaagaatttgcgggaaaagatgtgtcaaaatacaagaaaatcggaaacacacacgttttcgaccttgataaaggcacatggcgcgatcatttaaaagacatcggaaaaatcgtcaaccgtgaaaaagaagcgaaaacatttattcaagattacgaagatgaaacaaaacaagtcagatccatgatgaataaggaattagggaaaaacgccaaagtcatggcgatccgcgtgaacgcaaaagagcttcgcgtcttcagcacacgccgtccgatgggaccgattctgtttgacgatctgaagctgaaaccggctgacggcattaaagaaatgaacacctcccgcccttatgaagtcatttctcaagaagtgctgcctgattacaacgcagatgcgattttcgtcgtcgttaacagagacgacaagtcacagcaagcctataaagaattgcaaaaaagcgctgtatggaaagggctgaaggccgtgaaagcaaaccacgtctataaaattgccgatcagccttggcttgattattcagcaccgggaaataaattagcaatggatgaagcgaaaaaactgttccaaaaataaacacgagccggttttgcaaaaagtgcaaggccggcttttttatattgtcgtttacttatataaacatctgcttatataatagtgtaaaaaggagtgagcgcatggaacggaggcatcatgctttaagttccgaagggatcagccagtgcctcaaacttctaagcgacccgacgaggcttttgatgctgaagcttctgaaggataaggaatattgtgtctgcgagctgacagctatttttcatataagtcagcccggcatcagccagcacttgcggaaattaaagaacgccggccttgtgcgggaaagacgcgagggtcagtggcggtactatgccattcatccgtccggtccggaatacgcgctggtttgctcgattctgcagcagatagatgaaaaggacgaagttttacagacattgcggcaaaaagaagtcactgttacatgccggtaagggggatatattcttgggagttgcggttttatcagcgctgatttttgtgctgacacttgtgtttgtcatatggcagccgaaacatatatcaatcggctggtctgcctgcggcggggcggtcctcgctttgatcgccggagcagtcagcctgcacgatatcgcggaagtgacgggaatcgtctggaatgcgacacttgcctttatcgccattattatcatttcattgattcttgacagtatcggtttttttgagtgggccgcgctgcatatggccatggcggccaagggcagcgggctgcggatgtttctctatgtgtcggtcttaggggctgttgtctccgccctgtttgccaatgacggagcggcgctcattttgaccccgatcgtactggcgatggtgcgggctttgaatttacctgaaaagctggtttttccttttattatcgccggaggattcatcgccgacaccacctcgcttccgctcgttgtaagcaatttggtcaatattgtatccgccgattactttcatatcggatacattgaatatgcatcacgcatgctggtgcccaaccttttttctctggcggcaagcattttggtgctgtatctctatttcagaaaaaacattccgaaacggtatgacaccggtcttgtgaaacatccggcatccgcgattaaggatgaacgccttttccggttatcgtgggctgtgctggccgttttattgatcggatatttcgtcagcgaactgctgtcgatacccgtttccttcgttgccggctccatcgcggtcatttttctcattctggcgcagcgaagccccgccgtccctgcgaaacaagtcatcaaggacgccccgtgggccatcgtgtttttttctgtcggcatgtatgttgtcgtgtacggcttgcggaatgccggactgacggatcttctttctcagcttattcagaaagcggcggatcacggattgtttgcgggcacactcggaatgggttttatcgctgcgatcctctcctccgttatgaataacctgccgacggtgatgattgacgccatagccatcagcggaacggacactcacgggctgatgagagaagcattgatttacgcgaatgttatcggttctgacctcgggccgaagatcacgccgatcgggtcgctggcgacgttgttatggctccacgtgctgagccggaaaaacgtgaaaatttcctggggaatgtatttcaagacaggtctgatattaaccattccgacgttattcatcaccttgatcggactttatttatggctgttatggctcgcttgagatgaaaaaccttttaagttgaatcttaaaaggtttttttgtgtcaaaaatccgaaaagtaaaactttatattttaaaagtatagacatttaatttcaaaagattataatattcatgaaaacgttttaactttatgaaagaagggattcctcatgaaaagaattttattagcctgcagctcaggcatgtccaccagccttcttgttacgaaaatgcagaattacgcccgctccatcggtgaggaagccgagatttgggcagtcggacaggataaagcaaaagaagcgatgaaagatgcagacgtcgtactgatcggcccgcagatgagttttttaaaaggtgagcttcaaaaagaggcggacccgcttcacatcaccgttgatgtgtgattgacatgatggcttacggcatgggagacggcaaaaaagcatacgaacaggccgttgccttgatagagaacaaataaaggaggcgataagcatggaaacgtacacggatgaacagatcagttttcagctgattcttcacagcggcaatgcccgcagcaatattattcaatcgatacgcgcttataaagacggccggacagatgagtcagacacctttctgacaaaggctgaagaagaactggggaaagcgcacgacatccattttcagatgattcaaaaagaagccggcggcgccaaaacggatgtctccctgctttttatgcatgctgaagaccacttaatgtcagcgctctcaatgaaagagctcgtcaaagaaatgctcgacttatttcaatcaaagaatttataaaaagccgggggtgaagacgtgtttgagaaaatcagccaattccttgttccgatcgcgggcaaattaaacaataaccgctacttgcaagtcttacgggatgcttttatgctggcgtttccgctgaccattttcggttcggtgttcgtcgtgctgacgaacctgccgtttttaaacaaaatcatgagcagctccgccctgtctgtctttcaatccggatttggcggcgcttcgacggcgacgatggggattatgtccatttttgtcgtcttcgggatcggctattacctttccaaaagctacgaagtggaggccgtattcggcggagcgatcgcattggtttcttttctgctgctcaccccgttcgtttcagagccggaaacgggcaaagcggtcgcaggcgtcattccggttgaccggcttggagcaaaagggatgtttctcggcatgatgaccgcgtttttgtcaggtgaaatctacagaagaatcgttcagagaaacttaacgattaagatgcctgccggtgttcctccggctgttgctaaatcgttcgccgcattgattccggcttttatcacgcttaccgtcttcctcttgatcaatgcggctgtcacccagatctttcacaccaatctgcatgatgtcatttatcatacggttcaagccccgcttgtcggacttggaagcggcatcattcctacattaatcgctgttttctttattcagattttatggtttttcggacttcacggacaaatcattatcaattccgtgatggacccgatttggaatacattacaggtcgaaaatttagctgcgtatacagcgggaaaagagattccccatattatttctaagccgtttatggagatttacaccgtcggaatgggcggaaccggaatgacattggccatagtgatcgccatcttgctttttatgaaaagcaaacagatgaaacagatatccaaactcggtctcgcgccgggcatcttcaacgtcaatgagccggttattttcggtttgccgatcgtgatgaacccgatcattatcattccgtgggtcatcgcgccgatggttgtcacccttgtcacctacctggccatgtcggcggggatcgtgccccctcctaccggcgtgaccgtgccttggaccgtcccccttttcattaacgggattatggcgaccaattccgtcatgggcggcattatgcagctggtcaacctctgtattgtgtttgtcatctggttcccgtttcttaaagcgctggacaaattaaacatggcaaaggaaaaagaagctgagaccgagcagcatgcccgggatgacagcatgagtatgtaatcaaaatcgcagtaagggagagaaatcaattgactgaatcaaatattcaatatcgttttccggaaggattctggtgggggtcttccgcctccgccacccaaacagaaggcgccgctgacaaagacggaaaaagccaaaacatatgggattactggtatgaaaaagagccgagccgtttttttaacggcgtcggccccggcgacacgtcacgtttttacgatcaatacaaggaggatatccggctgatgaaagaaatcggccataactccttccggctgtctatttcctggtcaagattgattccggacggaactggcgaggtcaatcagaaagcggtcgcgttttatcaggacgtcatcgatgaaatgcttgcccatcgcattgagccgtttgtcaatttgtttcactttgacatgccgctcgcccttcagcgtaaggggggctgggtcagccggaacaccgttgacgcgtttgaacattacgccaaaacctgcttttcgctattcggtgacaaggtgaaaaaatggttcactcacaacgagccgattgtgccgattgaaggcggctatttatatgattttcattacccgaatcacgttaattttcaagaagcggtgcaggccggcttccataccctgctgtcgaatgcaagggctgtcaaagcctacagagaattgaaacaggatggacaaatcggaatcattctgaatctgacgccttcttatccgagaagctcacatcctgaagatatcaaagcgtcccggattgccgacgcctttttcaaccgttcatttttagatcccgccgtaaagggcgaatttcctgaggagcttgtcgagattctcaaggcggaaggctttctgccgcattatgagaaagaagatctccgcctcattcaggagcatacggtcgacctgttaggcgtgaactactaccagccgaggcgcgtcaaggcaaaagaacatgttccgaatccgcatgcccctttcctgcctgagcgtttcttcgacccgtatgtcatgcccggccggaaaatgaaccctcaccgcgggtgggaaatttatgaaaaaggaatctacgacattctcaccaatctcagagaacattacggaaatatcgagtgttttatttctgagaacggcatgggggtagaaggcgaggaacgcttccgcgatgaaaacggcatcattcaggatgattacaggattgaatttatccaggaacatctcaaatgggtgcatcgggccatcggagaaggttcaaatgtaaaaggctatcacctgtggactttcatggacaactggtcttggacaaatgcttataaaaaccgctacggctttgtatctgtcaatctggaaaacgggggcgaacggaccgtcaaaaaaagcggccgctggttcaaagccgtttccgatcaaaacggattttaacagatgaggagggacggccatgcttggaggtattgaagccggcggcacgaaatttgtctgtgccgccggacaaagagacggcaccattctggacagagcagagtttccgacgggagaaccggatgacacactcagacaggtcatccgttactttaaagatttcccgatagaagccatcggcatcgggtcgttcggaccgattgatatccgtcctgacagtcaaacatacgggtgcatcaccgcgacgccgaagacagcctggcggaactgccctattcttcaaacgatcaaaagcgctctggatattcccgcaggcttcaccaccgacgttaatgcggcggcgcttggagaagcttctttcggcgcggccaaaaacgcggacagctgcctttatttgacggtcggcacaggcatcggcgcgggcgccatcatgaacggcagatttgttcaagggctgtctcatcctgaaatgggccacatttatgtcagaagacatccggacgacggctacaaaggcaattgcccataccatacagattgtctggaaggcctcgcggcaggccccgccattgagaaacgctgggggaaaaaagcatttttgctcacggatcagcaggaagtgtgggagcttgagggctattatattgccgaagcgcttgtgcagtatattctcatactttcgccggaaaagatcattctcggcgggggcgtcatgaagcagcggcagctgttctcttctatccgtcagcacgtgaaaaagcggctgaatcaatatattgatctgcccgacattgaacacttcatcgttccccctcaattagggattcactccggcgcggccggttcgctcgtattggcggagcgcgcattaaaggcggcaaaccgggaagcggaaaaatgacgaaactcttatttttggaaccggtttttaaagaaagattatggggcgggacgaagctgcgcgatacattcgggtatgagattccttctgagcggacgggagagtgctgggcgatttcagctcatccgcacggcacatccattgtgcggaacgggcctttttccggaacatcattacagcgtctctggagtgaacaccctgacctgttcggacatccgaaagaagaggcttttcccctgctcacaaaaattcttgacgcaaatatggacttatccgtacaggttcatccggatgacgcatatgcacatcggcatgaaaacggagaactcggaaaaacggaatgctggtacgtgttggactgcaaaaaagacgcggagctcattttagggcatcgcgcccaaacgagagaaggcttcgttcggctcattgaacaaaacgagtgggatcacctgctccgccgcatccccattaagcccggcgattttttctatgtcccgagcggcacactgcacgctttatgtgaaggtacgctcgttcttgaaatccagcaaagctctgatgccacctaccggctttacgactatgaccggacggatgggaacgggaataaacgcgagcttcatcttcagaaagcaattgacgtaacagacattccccataccgatgaaaatgtaaaaagcacaaagcatcggatcggagatgctcttattacgatactcgccgaaacacctttcttttcagtttatcaatgggatgtgagcgggaaagcatcattccccgcacccggccggtatttactcgcaagcgtcatgaaaggacgcggagaactggatggatgtcccattcacaaaggcgatcactttatcgtgccggcggattccggagattttgttatagaaggagattgtgaggttatcgtttcacatccttcatcatcttaaaaatcaggaggtcttttatatgctcaaaaagttagcagtctgcctgtctatcgttttattactcttaggagccgccagtccgatatcggctcacaccgtttatcccgtcaacccaaatgcccagcagacgacaaaagatatcatgaactggctggcgcacctgcccaaccgttcagaaaacagggtcatgtccggggcgttcggcgggtacagcgatgtcactttttcaatgacagaggaaaaccgcttgaaaaacgcgacgggacagtctcccgccatctacggctgtgactatgggagaggatggcttgaaacagcggatatcaccgatactatcgattacagctgcaacagcagcttaatctcatactggaaaagcggcggcctccctcaggtcagcctgcatctcgcaaatccggcttttccatccggaaactataaaacggccatctcaaacagccagtacaaaaacatcctggacccttcaactgttgaaggaaaacggcttgaggcgctgctcagcaaaatcgccgacggccttactcagctgaaaaatcaaggcgtcaccgttctgttcagaccgctgcatgaaatgaacggcgagtggttctggtgggggctgacaggctacaaccaaaaagacacggaaagaatctcgctgtacaaagagctttacaagaagatataccgctatatgacagagacaagagggttggataaccttttgtgggtgtattcgccggatgccaacagagactttaagacagacttttacccaggctcatcttatgtggatattaccggtctggacgcttacttcactgatccgtatgcgatatcaggctatgatgaaatgctgtctctgaaaaaaccgtttgcctttgccgaaaccggtccgtccggcaatatcggaagctttgattatgctgcttttatcaatgcgatcaggcaaaagtatcccgagaccacgtactttttgacatgggatgaacaattaagtccggcggccaatcaaggcgcgcaaagcctttatcaaaacagctggacgctgaacaaaggcgaaatatggaacggcgggtccttgacgccgatcacggaataactgcttcttttgaaaatcggttttaagaaacggctctgctgggcatattgttaccgttcaaaaaggagggttcaacaatggaaaataacaaaaacagcgaagaaacgctttccagtaagacgaccggtaaaggcgagtcagaagacacgctgacaaaccggcagggccatccggtcactgacaaccagaatgtcaggacagtcggcaatagaggaccgacgacattggagaattatgattttttggagaaaatcagccactttgaccgcgaacgaattcccgagcgcgtcgttcacgcgcgcggcgccggggcacacggatactttgaggcgtacggaagttttggagacgaggagatttctacatacacaagagcgaaagtgtttcaaaagaaaggaatgaaaactccggcgtttgtgcggttttctaccgtcaaccacggaaagcattccccggaaacattgcgtgatccccggggttttgccgttaagctttataccgaagacggcaactgggatctggtcggcaacaacttgaaaatcttttttatccgtgatccgctgaagttcccggatcttgtgcacgcatttcagcctgatcccgttacgaacattcaggacggcgagcgtattttcgacttcatttcccaatcaccggaagcgactcatatgatcactttcttgttttcgccgtggggcatcccggccaactaccggcagatgcagggctcaggcgtccatgcctacaaatgggtcaatgaagaaggaaaagccgtgctcgttaaatatcactttgaaccgaaacagggcatccgcaacctgacacagaaggaagcggaagagattcaggggaaaaactttaaccatgcgacacaggatttgtatgaagcgattgaaaaaggcgattaccctgaatgggaagtgtatgcgcaaatcatgactgatgacgaacaccccgagctggattttgatccgcttgatccgaccaagctgtggtataaagacgatttcccttggaagccgatcggcaaattggttctgaacaaaaacccggaaaactaccatgccgaggtggaacaagcctcattcggaacgggcgtgcttgtggacggccttgatttttcggatgacaaattacttcaggggcggacattctcctattcagatacccagcggtaccgcgtcggcgcaaactatctgcagcttccgatcaactcgccgaaaaagcatgtcgccaccaaccaggaaggcgggcaaatgcagtatcgggtcgatcgggcagaaggacaaaacccgcacgtcaactatgagccgtccattatgggaggactcaacgaagcaaagcaggatgggaaagaccatacacctcatgtcgaaggcgatgtgaagcgggaagcgatcgaccggccgaataatttcggccaggccggagaaacataccgccgattttcggaatttgaacggaacgaattgatcacaaacttggtcaatacgctttcttcctgccgcaaagacattcaggaacaaatgattgagaatttcacaaaagcagatccggactacggaaaacgtgtggcggaagggctgaaaaaagccgccgaaagcaacagcggcgggccgatcggcactactgatacagcacaagccgcaaaacaggctgaacaggaaagccatccgtctgatccgtattaaataaaaaaacaggacaatcgcgtcctgtttttttgagctaattcagctcctgtatattctgctccgccgcggccgcaaatactttcggctccggacggtcaagatcttcatggaataaacttactttgtgaatctgccggttgtcgtacagatgaaagtagtagttcccggtgtcacagcacatgaccgacgtatactgcgtataatcaatttcattctcctctgtgatcaccgcgccttttggaatattcacattggacagcacgtgaaaagcggccgtaacgccatccgtttcatgagcagcaggctctaaatgctctttcagataagcggctctgatgaatcgggatggcggcgtgtaatcaccgggaagcccgatcgttccagatccttggccgaaagcggttaatgtcattccgcccaatgttttgctttctgactgctgcggcctgattccgatataatggcgcagattggtcacatgccaaggaaattctggactattggtcatcactccgggtttgttgtcatatactttcattccctccggtgtcggctcgatgacaatgcagccgcccgtgcggtctgataaaatccaatgaagaggcagcaccgtatccaataacattaacttcttctctacaatcgtcagcattgagagcttttcctttatgtcttcaagagattcacagtttgataaggcccaggtgacaaactcatgaggagcaatgtgacaggtgccctcccgttccgctttctcgtatcccgcaaagcccggaaaatacagcgtcgcacacgacagccctttttcatttacgccgtcggcaaacagaacattgccgagatttctccccatgccgataaatgcgtatttcgtcttatgcatcctgccgtcagcttcgcttttccagctgtactgacgagggtaaagcacgacgtccgtaccgagctgaaatgcaaaatccatcgttcgcgccaataggtgattaccgtctgtcgttttcaatgtaagacttgtacacatatcatcaatccccttttcattaatgaaatttacacaaagtaaactattctttcagcttaacgaataatggctccattcgtcaaaagattgacacatttctccttaatacatattagtccgtaagcatatccatgccttttaaaccctggcaaatcgttttggcggcagtgtttgttccgtttttcaaaaaaccctttgacggctgtcagcgaggctttacaatgtttttcctgcatgctggaatttgtaaacggcaggtcaatctgttaagctatgtctttatgttaaagaagaacatacggaggagattatctattgaaagtagaaaggcgaacgattgaacatattccgcatgacgaaagacacggaaaggctaaagatttattccccgtctggttcggggctaatatgcatattacgacgttagtcacaggcacactgcccgttacaatgggactcgatctcttttggagtatcgccgccattattatcgggacctttatcggcgcaatctttatggcgtctcattccgcacaaggacctcagctcggaattccgcaaatgattcaaagccgcgcgcaattcggcgtgatcggagcgattctgcccctctttttggtcatgtttatctacctgggcttctttgcgagcagtacgattctcgcagccggtacactgagcagctttgtaccgattccggcttcatggtgtattatcggcttaagcgccatctgttttttactcacgatctacggtcatgatctgattcacaaaatgcagaaaatcctctcttggacctcctttgccgttttttttgctgcaacgattcttatttttcaactgccgattccttcaggaagctgggtgcccggctcattagatctgcctgtttttctagtggcggtcagcgcggtggccacatggcagctggcatacgcgccatatgtcgcagattattcccgttatctgccggtcaaaacaccggcatcgcataccttttggtacagctacgcaggtacgtcagtcagttccatctggatgatgcttctcggcgccattttgacgacggcgctcccggaatttaccgctaatgcgggaaatgagattgtccgattgttcggtccgttttcctttattatgctgatcatcgtcctgttcgggcaaatggcgatcaacgtctttaatttatacggagcctttatgtcaacgacgactaccttagagccgtttttaaaactgaaggtgacgccgaaaacgagagtggtaatgattctttgtgtgacggcagcaggtactgtattaagtctcttgggccaaagcaatttcatggaactgtttttaaatttcatctttttcatcagttatttcttaattccatggacggcgatcaacctcgtggattactattttatccgacgcggaaaataccacgtcaaatcgatgtttgatgtcaacgggcaatacggcagggtcaattggattacagcggccgccttcgttttgtcgattatattagaaatcccattcatcaatacatccttttacatcgggccgctcgctgaaatattcggcggaggcgacattgcctgggtcatcggcctggccgttccgtcgctgctgtattatgtcctgatgaaatcaagggtaaaacaacaagaggcgccttctctatgaagacgccttttctttattcatattccttccatacacgcggcagcagttcagaaagttcgtgcgccaataaggtatgggcggagcgctctttcgtccataactccgcacattcaccgtgaaggcggacggcgttcaatacggcatgtttcgggtcttgatgacagcacagcatgccgagaatcattcccgtcagcgtgtcgccggtcccgccttttgcaagcgcgccgtttccggttgtattcctgcggcattccccgtcgggaaaagcgataatggtttcgtttcctttcaggacaatcgtggcatgaagccgctccgcccattccgcggcatatcccgctctgttctgctgaatctcttgaatcggaaggcctgtcattctggaaaattcgccgggatgaggcgtcaagatcacgggggctttcctctttggataggttcttttcgttatggcgcccgcgtccagtatgacgggataatcggaagaaagcagctgatcagccgcctgctgcacttcgtctgtttgaggaaggcccggcccgatggcagcggcccggatggtttccccgggctggcccgccgcggcttttttccagccgtcacgccagtacgtcgcttccggcagcaccgggacgataagcggaatgacgcctgccgatgtaccgatgacgagcttgccgacaccgcttctcatcgcgcccaatccggccagaagggcggctcccggcatgtcttcgctaccggccagtaataacgccgtcccgaacgtccccttatggctgtctgcctcccgcttcggcagcgtatctttcacatcctgttccgtccaatccattatattcatctctgtacctcctcttctgtctcctatttatattccaaacaagaagagattttaaaccgcacaaaaaaaacagccgctcgtttgcggctgtttatgttctgaccggaacatcaagacggtaaagcttccggtaccgttcattttctgcaagcagctcttgatgggttccttccatttctgcttttccattttctaaaaagacgattttatcagctgtttccacacccgctaaatggtgtgtaatccagaggatcgttttctctttaaagacatcaaaaatcgtatcaagcaattcgcgttcagtgaccgcatcaaggccgaccgtcggttcatcaaggataatgaccggcgtgtcttggagcagaatacgggcaagcgcgatccgctgccgttccccgcctgagaaacgaatccccgtctcctgcacggacgtttcatatccgtcaggcaatgattcaatataatcatgcagcttcacttgccgagccgcacgcttaacatcttcatcactcgccttgccgtttccgagccggatattgttcataatgctcgtgttaaagagatgaggtttctgattcaaaacggccaccgctgaggaaatctgctcctgcacggccgcagtttctatcccgttcagcatcactttgcccgaatcgggaactaaggcgccttcaattaaagcgagagaggtcgacttaccggagccgctcctgccgagcagcgccattttttcaccttggcggagagtgaaggaaaaacggtcaagcacatgactgtgctgatcataagaaaacgtcacgttatcaaatgtaagtgtcacatccgatacatccagtttctcatccgtctgcttcacctcacgacttcgcagctccggagccgcctgactcattcttttgatggaatcctgataagaaggcacttccgtcagcgcatccgaaaggggcagaaacgcctccgtcaatggaaatacgacaagcacaaaggccgcgatcatcgtgttggcgatgctgccgtccgcatactgacccgccgtccagaacagcatgatcaatatgaagccgccgacaagacattgcgcggcgagatcacgccatctcgtaaaccgctgacgtttgctttcaagatcaaaccatgccttctctttctcttcataagaggaaataaaggccgcctggcgtcccgagaacatccaatcgctcacgccgagcacggcatctgtcagccggctgtagagcgtattccggccgcttttcagcctcatgtttttcgctctcgtcacaagaagcgacacaaccggaaacaatacaaccaatataaacagataaatcgccgcaaaagcggcaaacggccaggaaaaaaagccgagtccgataacggatgccgcatacagcagcaaagcggaaaccgcagggaaaatcgtttttaaaaacgcatcctgcaaatgctcaatatcctcagccaaaatgccgagcatgtcgcccgtccgaaaacgggatgaaagcatgagcgaggccggctccagcatattgtaaagccgcaccctcatgtcggacacgattttcaaaatgatatggtgccccgtcagacgctcggcgtaccgtgagactgaacgggcaatcccgaaggtccgcacggctacaatcggaacgtacaccagcaggatattctcaggcctagccgccgacttagagatcaaaaaaccggaagtgaacatgagaaaggccgccgaaaaaatcgtcaccgcgcctaaaaaaatcacaagaacaaacaaacgggcattttgcttcatatacggcagaatccattcttcttttctcatgttctttcccccagttgcgcctttacaagtttggcgtatacgccttgtttcgccatcaattcgtcgtgggtgccgatttccgccaccgcgccgtcatcaagcacgataatttcgtccatctcaagcatccagtgaagacggtgagtggccagaaaaacaagtttgttttcaaacaggtctttcatcgtttcttttatttcatattctgtttcaatatcaaggtgagcggtcggctcatccaaaaggagaatcggccggtttcctaagaaggctctggccagcgcgacacgctgagcctgccctccgctgagcgcccgtccgccctcgccgatccggccgtcaagaccgccgggcagatcacggatcagttcggaaagacccgccgatctagcggcctgcgccgtttcctcacgcgaagcatcaggatgataaaaccggatattattcaaaagcgtgtcatcaaaaatatacgggtgctgcggaatatagagcagctgcttctgccagccgtccgactgcagatgcgagcgggattcaccgtttaccttgatctcaccggacgcaggctctaaaaagccgcccagcacatcaatgagtgtcgattttcccgcaccgctttccccgataattccgattttcttcttccctttaaaggacagatgaaattcagacatcgattcccggacggacaaacgcgtaagctgtaattcatcccggtcagtccacgtatcaagttcgagcggcttttcttctttaaaaccgggctgcgccaaaatcgcttgaatggttttccccgcctcctgcccgtttaacgtcgcgtggtaatcatttcccacttcgcggaccgggagaaaatattcaggcgcgagaatgagcgcggtcaatgccggcccgagcagaatttgtccgtctatcagccgcaagccgagaaacaccgccactgtcgccaccgacagcatcgtaaagaaatccagggcgaatgaagataaaaacgcgacccggagcgtgctcatcgtcgccttgcggtatctctcactgacatgaaagatgttttcactgtgtgatttgcttaatcctaaaaaccgcaatgtctccagtccgcggagcgaatccacgaaatgattggaaagcgtctgataggacttccattggcgatcggcttttttctgtgcgacaagtccgagcagaatcataaatacaatcaaaatcggaagcgcaagaatcagaatcaatgccgatgttttatcctgaaaaaacacgtaaataacaacggccgccggcacaatcgccatgctgaccattttcggcagaaacagctctaaataacggcggaactggctgatgccttccatcgccagcgtcaccatccggcctgtcccctcttttttcacaaagcgggggccgagacggaacaattgctcaagaaatctttttcttaagtccgcgccggtttgcgcggcatattggtacacgattttctgccggaccgctgtcaccgcatgccggatcaaaaacgcaagcaggaaaaagccgataaccggataaagagaagcaatccgcttcccgttaaataatccggttaccgcctggctcagccattccgcctgcaagatgatggcggccgtttgtataatcgttaatcccgtaatgatcgcaagaatccgcttcattcctttataaagaaacaggtcttttcccattaataagtcataggctccttatggctgacgcgtttccggaagacgtaatagctccagatctgactgccgatgacaaacggcagcaaagtcagtgcggcaattgtcatgaccttaagtgaataatcaccggaagacgcgttagctactgttaagtcatacgcgcttttcagcgagctgaccatgacgcgcgggaacagagagataaaaatcatcgcaactgtcaaagcaagacccgcgccggtcataccgaatgcccagccgtcttttttcttgctcatgaacacaacagcaagaacgttgcagatgacaatcagcacgaataccggaatcgtgatgtttgcccggcgtgtaaacatgtccgtatcgtatgcagacatcgcaaagaaagcaagtacaacaagaaagataacaccgattacgcgttttgccatttttctcgcacgctcttgtaaatcaccgatcgtgcgcagggtgataaacattaaaccgtgcaggaatgaaagaagggtgacggccgctccgccaagaacggaatacacgttcacaatatctgaaaaacctgcgtgaatgttcatatgtccgtcaatcggcacaccgcggaacaagcttgtgaaaataagtccgaatacaaatggcgggataaggctgccgaagaaaatcacccagtcccatgttttgacccattttaaatgattcacttttccgcggaattcaaacgccacgccgcgccccatcaaggcaagaaggatgatgataaacggaatataatatccgctcagcatcgtcgcataccagttcgggaatgccgcgaagatcgctcccgtacctgtcagcagccatacctcattcgcatcccagaacgggccgatggtgttaatcagcactctgcgttctaattcattatggccaagaaatcgggtcgaaatgccgacaccgaagtcaaaaccttctaaaaagaaaaatccgacaaacaaaactgaaacgagtacaaaccaaagatcatgaagtgaccccatggtaaacctcctgactgaacggatccgttgatacaggaacatccttatgatcatcatggtccgcaccttttttaatttcacgaacgaataggaagacaagcagcgcgcctaaaatcaaatacatgacgccgaagccgataattgaaaacagcagagatcccgtcgttacgttaggcgaaacggattgtgcggtcgtcatttgccccatgaccgtccacggctggcggccgatttcagtcataatccaaccggcagagttcgcaatgaacgggaatgcgatcagcgcgatcatgccccgtaaataccacttgctcgtatgaagctttttgcggcggttcagaataaagccggcaatcgcggcaaaaatcataagcgcgcccgctcccgccataatgcggaaactccagaacgtcgttttgacaggcgggatatagtcgccttttccgtacgttttttcatattctttttgaagtgttttcatccctttcacactgccgctgaacttctggtaagccaagtagctgagtgcgtaaggaattgaaatttctgatgtgtttttttctttattcgtatcaatgttcgcaaaagccgtccacgcggcaggatcaccgctgtcatcccaaagcgcttcactggcagccattttcatcggctgcgattccattaaatgctcagcctgcatatgtccgctgaacgcaacgccgataccggcgatcagaccgacaatcatcgaaagcttgaaagatttatggaagaaaggcacttcttttttcttcaataatttaaatgcgctgacaccggcgataaagaaagcacccgtcgcaagcgccccgaaaatgacgtgagggaattcaacccaaagctgagggtttgtcaaaagcgccccgaaatcgttcatttccgctcggccgtttttaatcgtaaagccgaccggctcctgcatgaatgagtttgccgtcaaaatccagaaagatgacataatcgttccgaaagatacaagccaaatgcaaagcaaatgcacttttttagataaacggtcccagccgaaaatccataatccgataaaaatagactccataaaaaacgccaaaagcgcttcaatcgcaagcggagccccaaatacgtctccgacaaaacgggaataatcagaccagttcaatccgaactggaattcctgaagaatccctgtgacgacgccgacagcgaagttaattaaaaagagatgcccccaaaatttagccattttgagataggtctcttgttttttgacaacataaagcgtctccatcaaagcaaccataaacacaagcccgatagacaaaggcacaaacaagaagtgaaacaatgttgtagatgcaaattgaatgcgggctaataccaactcactcatgatgtttttcctccaatctggtaaattgctcaacatttcacaaacatagcgaaatcattgctcggtatttcacaaaaaatgatatatttgctcaatgtttcacaaattcgtcaaaactattgaaatatcagcctgtacaccctgggggacagcggctgtcatagaaatgattcaatatcattactttacaacgattcagcctaaaaaaaagatcaatatacctaaaataaggctgaaattgtgaccgattattgtcggatttgtagagattttatgtcagcacctaggatatttgtccctttgatatcgtacctcttttttattcgtgtggcgaacaaaatgcttttctcggtgaaaaagcccgccaaatcgccattttgagaaagaaaatgtgaagaaagcatgccctctagtaaattcataatatatgaacaatttaaattttttagtatactttaaatggggatattttttcactacataacgactgggggaacaagcatgggagaacttcaaccaaaattgcaaacggattcaatccaaaaacaggaacggactgataactggtttgccagagcaatgaatataagaatcggcattattcctcttcctatctatatcctgcttttcttgcttattacggtgtttgtcatgagccgtgatgtaaaaagcgacattctgacatcaattgccgtcatgagttttttcggatttaccttcggccagatcggaaaatccattccgatcgtgcgttccatcggcggccctgcgattctcgcaacctttattccatccgctgtcgtctactaccacctgcttccgaaagacattattacttcaacaacagaattcacggaaagctccaactttctctatctatttattgccggtatcgtcgtcggcagtattctcgggatgaaaagagagacgctcgtcaaagctttcgtcaagatttttattccgctgatcgccggctcgatcgcggccgccatcgtcggcttatgcgtcgggacgctgctcgggctcggctttcagcacacattgctttatattgtcgttccgattatggcggggggtgtcggtgaaggcgcgattcctttatccatcggctactccgatattatgccgatgtcccagggagacgcctttgcgcttgtgctgccgtccatcatgctcggcagcctgtgcgccattatgttatcgggtttgctgaatgtcatcgggaaacgcaaaccggaatggacgggcaacgggaaggttgataagtctgatcattccgctcccgcattggaacagccggccaatgataaaacgtttgatttgtcctttttcgcttcaggcggtattttagcggtttctctctatttagtcggcatgctggcgcatgatttctttcagcttccggctcctgtcgtgatgctcgtccttgccgttctcattaagctgttcaggctggcgccggcttcgattgaaaacggagccttcggcgtctcgcgctttttctcgacagccgtgacctatccgctcttatttgcgatcggcgtttcaatgacaccgtgggacaagctgattgcggcgtttacgatcagcaacatcattaccattttatcaatcgtcgtcacgatgatggccgtcggttttctgaccggaaaatggctgaatctgtacccgattgagacggcgattattaatgcctgccattccggccagggcggcaccggcgacgtcgcgatcttgagcgccgctgaacggcttgagcttatgccgttcgcccaagtgtcgaccagaatcggcggagcgattaccgtgagtctcacccttctgctgcttcatcaattctattaaactgaaaaaagcctccgcatatgcggaggctctgttatttcatcacattttgaatataagagccgaatgccgcgccggacatgcccggcgacacacggacgcggtgaagcccgtaaagcccctgatctcttgacgccgctcccggctccgtcgtaaccgccatacggtagcctgacgcggcggcggcttttaatgtttccttattatatcgtccgactgggtagctgatcatagacgtccgctgcccgaacatttgatcaaataaacgcttagagtccttcatttcacgtcgctgctgctgcggtgtgagcccgttcaattcgagatggttcatcgtatggctctgaatggaaatgccgtgggcggccatctccttcatctgcttctcagtcagatgattcttatgcccgataaagtttccgatcataaagattgtcgctttcatcttgtatttctttaaaatgggataggccgctttcacattgtcggtatagccgtcatcaaatgtgatcagaacacatttttcacgcggctccttatcctccgtcagcatcagataggcctcttcaggagtcatcgtataatagccgtgatcatgaagccacttcatatgctgccggaattcttccttcggcacacgcaggctgtttccctcagaaatgctgtggtacatcagaatcggcagtcttgccgttcctttcgtttgaacccaggcggacgtatccggctcttttttgatttggcgctttacagactttttatcgtggtgcgcttctgccttcggaatgctttgttcggcgcttgcctcatggcccgagcaggcggcaagcgtaaacacggcagccaaaaggcacatgcacatgatcatgcgtttcatcgttttcctgctttctgtcttctatttactttttatatcggttatgcgtcataaattgttacatcaaaaaagccggacatccagctgtccggctttgcgttatgagcggattctgatttctgtttcactgtcaaaaaagtgagctttattcatgtcgaaagcgacggtcaattcttcaccggcatgaatgtcatggcgggcgtcaatccgggcgataaaatcctgatccccgatccgggaataaaccataatttctgacccgagcaattccgcgacattgattttagctgtgatggatgaattcttataggattctaccacaatcagctcgtcatgtatgtcttccgggcggatgccaaagataacatcttggccggcataccctttttcccggagcattttcattttcccttccggcacgctgagagcggctgaaccgatctgaatggcgccgtccgtcagctttcctttgaaaaagttcatcgctggggagccgatgaacccgccgacaaatacgttttcgggatgttcatacacgtctttcggtgtgccgatctgctgaatttttccgtccttcatgactacgatgcgtgtcgccatcgtcagtgcttctgtttggtcgtgcgtcacatagattgtggttgtttgcagcctttgatgcagcttaataatttctgcccgcatctgcacccgaagctttgcgtccagatttgacagcggctcatccattaaaaacactttggcgtccctgacaatcgcccggcctaatgcaacccgctgccgctgcccgccggagagcgccttcggtttgcggtgcagatactctgtgagccccagcattttcgccgcttcttcgacccgtttttttatctcaggtttcggcatcttcctcagcttcagaccgaaagcgatattatcatagaccgtcatgtgcggatataacgcatagttttgaaacaccatggcgatatccctgtctttaggagcgatgtcattcactctcgtgtcaccgatatagaaatcgcccttcgtaatgtcttccagcccggcaaccatccgtaatgttgtcgacttgccgcaccccgacggaccgacaaacacaataaactctttatctttaatatgaaggttaaaatcatcgacagccgcttctttttgatcgtaatacttataaatatgctccagccgaagttccgccatgtcatctcctcctttttgtaaacgctttctttaataggattgtaacagcgtcagacggcggtggatataggcaatgttcataaaaaaagtccgctgccttcgtgcacatttcccatttaatgtgatttttcatactgcagacaaatgaaataagccagcagggcgccccgatatgtcttaatatcaatacccgagcgttccgcaaatttatcaatccgatattgaagactgttgcggtgcaaatgcagtcttttcgatgtgagcgacatgttcgagttatgttcaataaaagtctgaatcgtatgcttcagctccggttctttctgaaacagcagcaccgcttcttcgtgaagcaaggctgagagcttttctctgctttcttccatgagcatagccggaaataccgtttccgcggtcagcgtgctcagctgcgggagatgacgccggccaatctgacaatattgctgttctctccgataatgaaggcgcagacgttctcccgcgccgtaataccttccgatgaaaaaacggacactgaaataaaaatcgccttcgagaatcttcacaaaagatgcgatgtcatccgaatctggcgcttccagcttttcttcctccacaatcacgccctgatcccttcccgtccggacaactgtatatgaaaccggccagaaatggcgcagcgcttccgtaaatgccccccagtcccgttctcccaataagtcataatggataaaacggacacgcggctccttgacatcaggcaccgggccttcttccagcagaaaacgccgccacctctttgctgccgccgtctccggaaaaaaatcgcctttttcttcagcgggcgtcaaaagtgattccagaagcagtttctccttcggggtgatatcctccttcggaatggcgacatagacccgccttttctcatcataaaagcaaaagacatcctccgccgtacagcacgtatcagacaacacagccctcgggtaaattgccaataacgggttcatatgcgctcctttctatcgctctatcatattttcagtataaaacgtccggccgattgtatccacttcgttttaagagacagctttcaggctatttcccgggaaacggatcataacagcttctgccggcataagaaaaaaaccctccgcgccggcagagggttcctttttatttagagatatcgacgaagccttcaccaaagacgtcacgcacatcatgaacaatgacaaacgcttttgtatcacagcttttaataatttttttgagcatggaaagctcttgtttctggatgacgatatataaaatttccttcgactgccccgtgtaatttcctttacccgacagcagcgtaacccctctgtccataagcgtgttgacctgttcagcgatttcgtgcttatgctcagatataatcgtcaccgcttttttcgtattcaggccttcaatgataaagtccatcaccttcgttccgatgtacagcatgacaatggtaaacatcattttttctgcaccgatgatgaaataagaactgaagacgacaatcagatcaaagaacaaaagcgcatagctgatattccaatcgagatatttgttcgcaatcctcgccaaaatggcagaacccgcagtcgtgcctccgactcgaataatgatcccgattccgacaccggcaaacacacccgcaaaaatagtattaataatgagttcatgtgaaggcgagtgccaatcatgcgtcagatgcagaaacagtgagttggcgacaacggtaatgatcgtataaagcgttgtttttccgtctaaaaatttatatccgataatcaataagatcccgttcaaaatgatattcgtcaccccgggcgaccattcaaacacatagtacaagatcagggtgattcccgttaccccgccctctccaagatcattcggaatggcgaataaattaacggccaaagcaaagataaaagccccaataatcagcatcagcacatccagcaatctctttttcatcccagacactccctttatataaaatcaaaaaagcccgggagagcactcttcattaaaagagcagaaactcccgggcttttatcccaacgtgtcacagcaggaacctgctgtgtgttttctctcggtccagaccaattcagcattgcggaaccctagaaaaccactgttttttatgttcagtttttgtatatctttcaagattatacgggaaatcacgaacatgttcaaccactcttttttcaataaacgtataaaaaatatgagcgatctgccgatactaaaaaaggcactaaaatacatgactaaaaaatcattaaaatacttttttctcaaaatattattgactgtaggttattttacaggcattatagtatgtagttttcaagaaatagtttacataggaggaaatattatggcaggcaacctggtgtcttgtaaggcatgcggcaaagaaatcgctaaaggcgttaaaaaatgcccaaactgcggtaaagatcagagaaacttttttatgagacataaaattatcacattgcttctggcagtagtggttattatcattctcgtaaacatcggcggcggaggcggatcttcatcatctaaaaccgcgtcttcaaaagctgcggaatccaaggaaaaactgtataacatcggtgacactgttaagactgaaaaaacagaagttactgttacgaaagtggaaaaaagagattcagtaggctctcaatttgtcgagaaaaaagcatctgacggcggcgttatcgtagctgttcaatacacagttaaaaatgtttcaaacaagccgttaagctctttctccattccaagagcgaaattagtagattctaaaggaacatcctatgattcagatattgatgcttcttcaagctatgcaacagaaacaaaagtagacaacagtaaaattttaagtgacttgaacccgaacattaaagttactgacgtaaaagcctttgaagttgataaaaacgcatactctaaaggtacttggaaaattaaattcagcaacgatgttgaagtgaaaattaaataatgaccgtataaaagagaccttcaccatttgaaggtctctttctttttacaccttttggtacccgttcacattggaggactgccacttccaagagtcggcgcacatttcttcaagcccgcgctttgcttcccatcctaattcagcctttgcttttgccgggtctgcgaagcatgcggcgatgtctcccgggcgccgggcggcaaaacggtacggcacttcttttcctgatactttttcaaacgccttgaccatctcaagaacgctgtagcctcttcccgtgccgagattataggcatccgcgcctgttgtgttcagcaccttctcaagcgctctgacgtggccctcggcaaggtcaacgacatggatgtaatcccgcacgccggtgccgtcctttgtcggataatcattgccgaacacctgcaattgctcaagcttgccgacagcgacttgggcgacgtacggcattaaattattcgggatgccgttcgggtcttctccgatccgcccgctcgggtgcgcgccgaacggattaaagtagcggagcagcgcaaggctccattcagagtccgctttatgcagatcgcgtaaaatctgttccagcatcagctttgtctgcccgtaaggattggtcgcgcttaatggaaaatcctcagtgatcggcgttgtttccggaacgccgtaaaccgtcgctgaagaactgaagacgatttttttcacaccgtgtgcctgcatggcttcacataaaataaacgtccccgtcagattattatgataataacggagcggaacagccacagactcaccgacggcttttaatcccgcaaaatgaatgacggcttcaatctcattttcagcaaacacccggtgaacggcatcacggtcaaggagatccgctttataaaacacaagctcttttccggtaatgtctttcacacgctccaatgcttccggtgaactatttgacagattatccagaaccacgatgtcatagccgccgtttaacagctcgacacatgtgtggcttccgatataacccgctccgcctgtcactaaaatcgccatgaagaaagcctcccctattgaatgaattgaccatattatatcggttttttcttcctcaatcatccatttccaaaaagtttaatcgtttagtcatcgtttcttcataatttgttttcattcgcgtaaaacacagagccttcgattcaaaccggttgcgaaatagaaatccctcccccgcgcatggtaagataagacaaaggagatgacggtatgaaaaaagaaatcattgaacgctttacctcttacgtaaaagtcgatacacagtctgacgaaaacaatgaaaactgcccttcaacccccggccagctgacattggccaacatgctggcagatgaattaaagtcgatcggcatgacagaaatcacagtcgatgacaatgggtacgtcatggcgactctgccggcaaatacggataaagacgtgccgactgtcggttttctggctcacgtggacaccgcgactgattttaccggaaaaaatgtgaatcctcagattattgagagctacgacggacatgatatcgttttaaatgacaaactcaatgtcgtcctgtcgcctgagcaattcccggagctctcccgctataaaggccagacgctgatcacaacagacggcacgacgctgctcggagccgacaacaaagcgggcattgccgaaatcatgacggcaatggcgtacttgatcaaacatccggacatcaaacacggaacgatccgggtcgcgttcacgcccgatgaagaaattggcagaggccctcacaaattcgatgtcggccgcttcaacgcggcattcgcctacacgatagacggaggccccctcggcgaactgcaatatgaaagctttaacgcagccgccgcaaagcttacttgttacggaaaaagcgtccacccgggaacggcgaaagacaaaatggtcaacgcttcaaaaatcgcgatggaatttcatcacgcgctgccgaaagaagaagcgccggaatatacggaagggtatgaaggcttctatcatttactttccttgaacggagacgtttctgaagccgccctgtcgtacatcatcagagactttgacagagaccgctttgcagaacgaaaagaatatatgcagaaaaccgccgatgcgctggcggccaaatacggcaacgaaagcatcaagcttgaactgcgtgatcaatattacaacatgagagaaaaaatcgaaccggtcaaagagatagtcgatgtcgcctatcaagccatgaaaaacctcgatatcgaaccgattatcgaaccgatccggggcggaaccgacggatcacagctctcttacatggggctgccgacaccgaacattttcacgggcggccaaaacttccacggaaaatatgaatacatttccgtcgatcatatggaaaaggcggtaaacgtcattgttgaaatcgccaggctctttgaagagcgcgcttaaaaccaaagccccctgctttggtttttttctttcacatgaaacctttccttctttctttccgtatataaggtatgaaatggaaagaaggagtgaagactatggcaagagggactgtagcgaaagaattgaaaaaaaccttaaaagacccgcgtgttctggagacgaaatcaaacccttttaaaaagctgcggaaaatgttcaaacgatttttttaagataacatctcgttttctttaaaaaaataaagaaagcgctgtcatcctgcagtcatctgttagaagcagttattttgcatattataagattttttagggtactgaataacacagggcaaacgaaaacaacgaagtagttaatttgatgcttacaaaaaatagtgaaaaagttatataaatgattatcattcatcagccgatacaatctatagaaccacaacaagagcaaaacttcttcaacccatagtcatttttacggaaaatgacgttattttttaaaaaagtgacaattgttcgaatacttttcgtttgttttttcgtacaataataataccaaaactttttttgggaggtatgtaaaatgatgctacttatttttgctgctttgacagggtatcttgttttctctttcagtaaggacaaccgccggaaaacgccaaagacaagcccgctggtgacagctgccgacacgaataacatcattgatttaaatgcgatccgtcaaaaacgccggatgccgctatcataaaaacgacagctgccgcaaaatcggcagcctttttttatgcacccggccgatatgaaaccaaccgcctccttttttcgtacaacataaaaaaggagtttttttatgtaccatttttacatcaaagagcgaatgtttacgtttaagaatcgttttcaagtgtttcttgaaagcggaaaagaagtctacaatgttgaaggaaagctgttttcattcggtgatgaactgaagctgactgatttggacggccgcacgctcgccagcgtcaatcagaaactgatgtcgttcgttccccgttacgagatttccgtcagcggcaaacccgtctgccaagtcatcaagaaagtcacgcttttcaaaccgaaatttgaaatttccggactcggctgggatcttaccggcgatgtgtggggccggaattttcaagtgacagacggaaaatcaaaccggatgactgtcaccaaatcatggatgagctggggcgattcctatcatttgcagattgaaaaggaagaggatatcgttctttgtctcgcgatcgccattgtgatagatatgattctatttgagggtgacaaataaaaatatttatcgaaatatattgacaatatgagaaaacatactaagattaatagtattacagtttattctgaaaaatagcatatttccttatcaagagaggtggagggactggccctatgatacccggcaaccgctgttcagcagaatggtgctaaatcctgaagataaggttgagatttgcggacgcaagctcttccctatccgagggaagagttttttttatatttcatcaggaaagaaggaatcgttcatgtcacagcaaaacacagaacaaccattgcatacgcttctaagaaaaaacccgccgtttcgcgcggatcaggtcggaagcctgctgcggccggcggctgtgaagcaagcccgcctgcaaagagcggcgggtgagatttcggcagaacagctgcgcgaaatcgaaaacaaagaaatcatccgcagtgtgaaaaagcagaaagaaaccggcctcaatgtcgtgactgacggcgaattccgccgtgcctggtggcattttgattttctcgaaaatttagacggcgtcgaagcgtttacgcctgaaagcggcattcagtttcacaacgtacagacgaaagcgcgcggcattaaagtaacgggagacattgatttttctcagcatccgatgctcgaagattataaattcctgcacagcattgccggcgatgctgttccgaaaatgaccatcccaagtccgaatatgctgtttttccgcggaaaattggaaaaagcgtcctaccagaatgattacaaacaatttcagcacgatgtgtcaaaagcgtataaaaaagcgattcaagctttctatgacgccgggtgccgctaccttcagctcgatgacaccgcatgggccgttttcttatcagaagcggggcttcgtcagattgaagctttcggcacgacgccggatgagctgcgcaagctgtttgccgcttccattaatgacgccatcaaggatcgccctgacgatttgaaggttacgatgcatatctgccgcggcaacttccaatccacatggacggctgaaggcggctatgatgcagcggctgaaacgatttttgacgggcttgaccttgacggattgttcctggaatatgatgattcccgctcgggcggctttgaaccgctccgttatgtcaaacgctctgatcttcagcttgtgcttggcttgattacgtcgaaacacggcgaactcgaagacaaggacgcgattaaacgccggattgaagaagcttcacaatatgtcagcctggatcagctttgcctcagcccgcaatgcggattcgcctccactgaggaaggaaacctgatcacagaagaacagcaatgggcgaaactgcgccatgtcgtcaacattgccggtgaagtctggaaataaaaaaaagacacgcgattagcgtgtcttttccgttttacagcggatcggttccgattaaaatatcgatatctatcgtgacagcagcctctttccggctgataaaccgccggatgctgtcatcagtacatttccatgttaagggcgtcattttcacaagccgctcgaggtcaggctgcgctaaagtctttgtgtaacacagccgtttgcgctcaaaggtttgaaagcccgcttggaatcgtccggccgcagaatcggcggtgtcattcagccgaggactgtctccgaagaagaattcccttacttccttcaaataatcacgccgcggcaccgctttaatgactgtgccgccctttcgtaaaagcctgctgcattccttgtaattccaaggtgataaaacagacatcacgacatcaaaacagctgtcggcaaacggcgcatccgccacatcagcgacggcaaaaaccatatgattcccgaaggcctttgcggcatgcagcacaccttctttcgagagatcaatgccgattcccgtcacggaaaaagcaggctgaagccatttgcatacggcggctaaatgagacccttctccgcaccccgcatccaatatcgccgctgatgtttgcggagattgaatatgggtgatgatggcggcaatctccttttgaaccggcgcaaaaaattcccggctgtcaaaaagctcgcgtctcgcttcgaacagctgcctgtcatagcgggttttgaccgatttattgaggaaattcacatatccttgttttgatatatcaaatgtatgcccctgtccgcaaatcaagcttcggtattgtgagaccgccatggccgaccggcatagcggacacctgaacacggactggcatgattgcagtaattccgcgcgttttctttttgtagacgtcaaaaaaacacctcattcattcgttattccgatgaaatgaaaaaggcatagacaaataaaccttgccaaattggaaggttcaacctatttatctatacctctcattatctgtaacgaatgaactggatgatcacgaaaatgaccccttttctgccgtcttttgaaggctgtgccctcagatccattttatcagctgcatcccgtctttacaatgaaccggaacggtttttgagagttttttatacctttattatccaattacttatgaacatcctttattttctttatttataatataaatttattattttgaaaatatctaaaaaggttgattttcaaaaattgaaacgataaaatactgctatctcatgtaatatcgttattcttgtatatgatcagtaatatggtctgattgtttctacctagtgccgtaaaagactagactacaagaaagtttgcataaatttgaacgagtgaaaagcatatgacgctgtctattcttttcttttggctcttatttatcacactttctggctttcaggaatttgtgacgaataagagctttttttatttccataatacccttataggagttgctcacatgtactttttattgaacattgtcggtctcattgttgtcatggctgttgttttcttatgctctcccaacaagaagaagattaaatggcgtccgattgtcatgctcctcgtctttgagtttctgattacttggtttatgttagggacaaaagtcggcggctttgtcatcgggaagatcggcgcgttctttacatggctgatttcctgcgccagtcaagggattgcgttcgcttttccgtctgtcatggcgaacccgacggttgattttttcttcagcgcattgctgccgattatcttcgtcgtgaccttctttgatatgctgtcgtatttcggtattctgccgtggctcattgataaaatcggctggctgatttccaaaatatcccgtctgccgaagctggagagctttttctccatccagatgatgtttttaggaaatacggaagctttagccgtcatccgccagcagcttgccgccgtcagcaacaatcggcttttgacattcgggctgatgagcatgagcagcatcagcggctcgatcatcggatcatacttgacgatggttccgtccacttatgtgtttacagccatcccgctgaattgcttaaacgcgcttttaatcgccaatatgctgaatcccgtggacgtttctaaagaggatgatattatttacgttccttcaaaagcggagaaaaaagacttcttctccacgatttctaacagtatgcttgtcggcatgaacatggtcattgtcattttagcgatggtaatcggctatgtggcgttaacggccgcgttaaacggcgtactcgggctgttcatgcacgggttgaccattcaaaagattttctcatacatcttcagtccgtttgccttccttctcggattaggcgtacatgacgcgatgtatgtcgcacagctgatgggcatcaagctcgcgacgaatgaatttgtggcaatggccgatctgaaagggcagctgaattcacttccgccgcacacgattgccgtggctacgacattcctgacatcattcgcaaacttcagcaccatcggtatgatctacggatcttatcaatctctgcttgatggtgaaaaatcagccatcatcggaaaaaacgtctggaagctgcttgtcagcggaattgccgtttccttattgagcgcggcgattgtcggattgtttgtctggtaatagaaaaagcgataccgctccgttttggagtgatatcgcttttttttattgatagacggatgcaggtacgaaaacgtcccggattcctgccgcgtacggcccgagatcatattgtccgaacacaacggcaatgccgtttttcgtaaagaaaaaaggtctttcattattcaggatgatctcttgttttttgacgtcctgatcgaacagatcgtcatgtttcttgatgtagccgtaaagatagtctctcgttttgttagctttcgtttttgtattcagcacattatcgagtgtgacccgttttttcgcggccaggtcgtaattaaaggtctgaacggatgtcagcccgtgtgcgccgcctgtgtaactgtagtcttccgtctgaatgctgagcttgccgtcttgattatacttcaccttaaaatctgtttggtattccgctttgtagccttgtttttcaccgtcttttttgtttttcacatattctttgtacgattgttcaatatagcgcttgaagtcctgattgactttcttttcaaaagatgcgtttcccgtatttgtgacctcggggtatgtcagctgttttacatgcttatacgtatggcttttgacaacgggctttgcagtttgcgcggcctcggctgaaggcgcgaaacctccgaacggcgcggctgtcagcacggttaagagcacagccgccatcattttgaatgcctttttcatcacaactcctccttttcattaccgttccctttttgaaaacgggttacactctatagacagcgcggatcagcaaattgtttctgggccttctttcacattttctccatgaaaaaaagagacatggaaaatccacgcctcttttaccgtgaaggtctttgcgcaatggcttcataaacggcttccgccaaatcggagttgccgaacatctccaaaacgccgataacggtttgatcaggaatcggttctgattcctccttcggcacgacaagctcttcagccgtttttcgcagctcttcgtttaaaggctgtccgggataagccttgctgtaaatggccatcggatcaaggtcatgattgacgcaccactgggcaaacaccaaaatcatcatgttttcgtcacgccggtaatattcttcaagttgtttttcggtaaacggcttcactatcattcgctcctccagaaaatctacccctaagatacacaaacacagagcggaagtaaaccaaagatcatttcaccatcagtcagaaccctttaaataatgcaatgccctgactctctaaaactgttgtctgaatgtcccggacagcggaagatacggatttgcacggaagccattttcgttttctcccaatattaatgcttcgttcagatatttcactttcacaaggaaaaagcgcccctctcataaaaggcgctttttcattcttatatgtttctgtcccaatgccgatgctcagccacggcgttcagaaattgttcatggtttccgtccggaacaaggccggggccgctttcggttccggcggcgagggcgagaagttcttttccttcaccggaggcgccgatcgctttgtaatggctgaaagcttcgctgacgaagtctctggccgatttttgggctttgaggctgtctgtgctttgttttccgcccggaatgaaaacagcgtcgtacaggacggaatccgctgtcaggaaagtggctgacgcttcgagctccgtgccgttttcccccttgacggttcccagcgcggggctgatgatatcggctctgactcccgcctgtttgcatgcgtcaagcacttgtttgactttctcatcagaaaacccgtggtcggttaaaaccgcgacctgccttgtcgctgccgtcttcaccgtgttttcctggcttaaggccggggaagtgaacgtttcatcagattcacggtccttcggcggcgggttcacgccgattcctttcgcaacacgctcggcaagcccggcgtcgacgtgactgaagacatcaaccacctgctgctgcacgtccttgctgttcacttttccgacttcaaaacagaaagcggagatgatatgttctttctcggcgggagacatgctgttccagaacatcttggcctgagaaaaatagtcattgaagctctcgctgcgctggcggatttttctgccttctactttttcctggtaatgaacgtatccgccttcttcttctgaagccggcgacggatcattgttctgcagggaatttttatgataggcgacgggacccttattaatcgtcatccggtggtagccgtcgtattggttgttatggaacgggcagaccggccggttgatcggaatctcgtgaaaattcggcccgccaagacggatgagctgtgtatccgtataagagaaaagccggccttgaagaagcggatcattggtgaaatcaatgcccggcacgacatttcccgggtgaaaggcgacctgttccgtttccgcaaagacattgtcctgattgcggtcaagggtcatttttccgatcagcttgacgggaaccaactcctccggccacagcttcgtcggatcaaggatatcgaaatcaaacttaaattcatcttcttcgtcaatcatctgaacaccgagctcatactcgactttgccgccgttttcaatcgtttcccacaggtcgcggcggttgaaatcggcatctttcccggcaattttctgcgcttcatcccatacgagggaatgaacgccgagcacgggtttccagtggaattttacaaagcgcgcttttcctttctcgttgatgaaacggaacgtatgcacgccgaagccctccatcatccgatagcttcgcgggatgccgcggtcagacatcgtccacatgaccatgtgagccgactcagggttattagcgacaaaatcccagaacgtatcatgagccgtcgcagcctgcggcatttcattgtgcggttccggttttatggcgtgaacgagatccgggaatttgatcgcgtcctgaatgaagaacaccggaatattgtttccgacgaggtcatagttcccttcttcagtataaaacttcgtcgcaaatcccctggcgtcacggacggtgtcggctgaccccttggaacccgccactgttgagaaacggacgaaaacaggcgttttgacggacgggtcttgcaaaaatttcgcccgtgtatattccgtcatcggttcgtacacctgaaaatgcccatgaacgccgtacccgcgcgcatgaacgacccgttccggaatccgctcgtggtcaaagtgcgtcattttttcacgaaaatgaaaatcctccatcagcgtggggccgcggacgcccgcttttaaagaatgttcatcctcagacacgcgaagcccctgattggtcgtcatttttttgccgctgttatcagaccggtactgctccagctgttcgtcctttgagtgttcatttactcgtttgttttgatcatcactcatgtcagttcccccttttaaaacgaaacattctacagcacatttacccgcggcgttcttcatataaactgctgatccgctcattaggattttaggtctgtatttacatatgcggtcatacacattttgaaataagccattttcacagaaataaattgtgaaagcgcttaccaatacagctgttgaacaggggaggtcatatcgtgcttgccatactcggttttgtgatgatgattgtctttatgtatcttattatgtctaatcggctttccgctcttattgctttgattgtcgttcctgttgtgtttgccctgatcagcggatttggcaaagatctcggcgagatgatgattcaaggcgttacagacctcgctcctaccgggattatgctgttattcgccatcctgtatttcggcattatgattgactcaggtctgtttgatcccctcattgccaaaattctatcgcttgtcaaaggggatccgttaaaaatcgccatcggcacggcggttctgacgatgaccatttcgctggacggagatgggacaacaacgtatatgattacgattgcggcaatgctgcccctttacaaacggctcggcatgaaccgtttggtgctggcggggatcgcgatgctcggttcgggcgtcatgaatattattccgtggggcgggccgacggcgagggttttggcttccttgaaattggacacgtcggaagtctttacgccgctgattcccgctatgattgccggcgttctctgggtgatcgccgttgcttatctcctcggaaaaaaagaacggaagcggctcggtgtcatttcaattgaacacgcgccgtcttctgatccggaggcggcgccgctgaagcgtcccgctctccaatggttcaacctgatgctcactgtcgccctgatggccgcgctgatcaccagcctgcttcccatccctgttctttttatgatcgcgttcgccatcgccttgatgatcaactatccaaatgtcaaagagcagcagaaacggatttcagcgcatgcgggtaatgcgttaaacgttgtctcaatggtgtttgcggcaggcatattcacaggcattctctccggcacaaaaatggtggatgcgatggcgcattctctcgtttccctcatccctgatgccatgggcccgcatctgccgttgatcactgcgattgccagcatgcctttcacttttttcatgtcaaatgacgccttttacttcggtgtgcttcccatcatcgccgaagccgcttccgcttacggaatagacgccgctgaaatcggaagagcctccttgctgggccagccggtgcatctgctcagcccgcttgtgccatccacctatctattggtcggaatggcgggcgtcagctttggcgatcatcaaaaattcaccatcaaatgggccgtgggaacaacgattgtgatgacgattgcggcgcttttgattgggattatttcgttttaattaaaaaaggatttccgccagcggaaatccttttctgtacattatttttttgtatagcgcacccagtcataatgagcgtatagcggatttacaccattgtaggaaccgagccagtcatcgacacctatcccattccacaagttcatcatgatctttcccgggtttgtcgggatttggcttgtcgcagtatgttttaattgcccatcgacataccatttaatagagtttggctgccaatcgaacgcatacgtatgataggcattggccgcgtcaaatccgagatccgcaaccttctcatggtttcccgcgccatttgtataatagttaaattgaacctttgtcgtgtcttttcctaaaaattcgatatcaatctcatcccaaggagtaccatccgttggacctgtataagtgaagaacgatgaaacgatccctgtgtttttagccggcttcattctgacttcataaagtccatagccataggtttgagcggagcggttctccccgcagtcaaacttgttataagacgggcttgtcagcgccaaacgcatttcacctgatgacgtcacggacacattatttgcacgccacgtgcagttgaacatatctccattggagtaaccatttgctttttgccataatccagagttatagctgttaaaaggttcaaaaaacgatccgcctgtttgagctgatgcagtagaagtgatcgcacacaaactcaaaaacaatccagtgacaagaagcagcagcactcgtttcatacgataaaacatgttggcattcccctttctttgaaagcgatttctttatcgatcatacatgattctataaaagggaacatcagtcagaataatgataaaaacgaaacttaaaaagacctaaattaccatcagcacaaacagagatgatccgcgctcattgtaatttaggttttgcctgcttatcagtaacaatcctaacaagatcatatgtgaatgaagaaaaaaatgccaacgctttcattatgcttatttgactaccctttctatgtgaatcgttaaatacagcagctcgtcactggtgagcttgtgttcatacgtcctctcaatgcatgtttggattttcttcgtgcattcatacgcccgatggtacttttctttcactgtctccagcaaaaagtcgtcctggctttccatatgtgtgccgttaaaaagacgctgcgcgaaaaactttaagtgggtgacaaaccgataatagtgaagtgattcctcgttgaagtcaatcttaaaatggtattttacgattctcaaaatctcttgcatgacttttgtaatgttgatgatattgggcatctcttcattcagctcggcattgacaatatgcagcgcaataaagcctgcttcatcctccggcagagacacgccagtcttgttttttaccatggccaacgcttgtttgccgattgcaaattcgtctttgtacagccgtttcgtttcccacagtaaggcatttttgatatccagcccttttttattgcgctggatcgcaaagttaatatggtcggtcagcgacacatagatgctgtcattgagctttttgccgagctgtaatttcgcatagctgataatctcttcggatacttccatacattcgatcgggatatcatacaaaagggttttgaacttttcggatacatctttgttatcgagcgtgaacactttctcaatgagggcttcatctaccgggtctcccgttttcttttgaaaagcaatgccccggcccatgataaccaattcctgattgccttctttgagcacactgacgacattattattaatgactttcgcaatcttcaattctgtctccctcccgcctgaccatttacctgctacaccttgattttacatcctttttgaactaggtcaatatctccaggtcaatcagaaaacgccgttcagaaatcattgtccaacgatgaggcagcggcgcatataatgcagagaaccggtttttgggaaggagcgtgtgtgatgaaacggttttcgaaagaagaaagcagctggatgctgtatgattgggccaattcagcttattcggtcattattatgacggcggtattccccttgttttttaaagccgcggcggcggaaaacggtgtcagcgcggcggattctaccgcttatttgggctatacgattgccgccgcgacttttattttggcgatgctcggccccgtcttaggaacgattgccgactacaaaggatgcaagaaacggttttttgccttcttttttctgatcggtgtggcgggcaccgccgcgctggctttgattcccggcgaatcttggatgctgttattaatttgttatacgatttccacgatcggctttgccgggtctaatgtgttttatgatgcgtttctcgttgatgtggccgcaaaggagcggatgaatatggtgtccgccaggggatttgggctgggctatatcggcagtacgatcccttttctcctcagcattgccgtgattctttcagcacaagcggaggtgattccgctgtccgcccaggctgccggccgcattgcctttttgattacggcggcatggtgggggctgttttcgatcccgctccttctccgcgtccgccagcgctattatatcgagagggagccgcggcttgtactcagcagttttatacggctggccggcacgctgaagcagatcaggaagcaccgggcgctgtttttgtttctgctcgcctatttcttctatatcgacggggtcggcaccatcattacgatgtccacgtcatacggggctgacctcggcatcagcgcggcaaatctgctgattgttttatttgtcactcaggtcgtcgccgcgcctttttcgattttgtacggacggctggccgaacggtttaaaggaaaaacgatgctttatgccggaatcggcgtgtatatgattgtctgcacgtatgcttattttatggattccgcttttgatttctgggttttggctatgcttgtcgccacttcccaaggcggtattcaggcgctgagccgctcttactttgcaaagcttgtccccaaacagaacgccaatgagtttttcggcttttataatatcttcggcaagttcgcttcgattatcggcccgcttttgattgccgtcaccgcccagctgaccgggaattcgtcagccgccgtgttcagcctgattttgttatttgtgatcggcattgccatccttgcgttcgtgccggaggagacggcgtaaaaaaagcctgcgcgcggcaggctttcttttttatttcttggctttatggactttcagttttttgcctttgaccgtcgtatttttcatgatgtcaagaacgtgcgggcctttgccgttcagaatttcgacgtacgatgcgttgtccaaaatcgtgataatcccgatatcatcggctgaaacgccgtcgattttcgcaatcgttccgacaaaatcgaccgctctgagttttttctttttcccgccgttaaagtacagcttcatgatgtctttgtttaactgttcgcttttgtctgttttgacatcgaggcgggcgttcagtttttccgaaaaagccgctttccgttccgctgtttctttctcggacggcgcctcccgcttttggatgcggaaaccgatatatgtctcaatgtcattcaggaaccgcgattcagaaggcgtcacaaacgtaacggccagtccgcggtgtccggcgcgccccgttcggccggtgcggtgcacatagctttctttttcaagcggaatatcataattgatgacgaggctgatgttttcaatatcaattcctctggcggcaacatcggtcgcaatgagatagcggaactcgccgcgcttgaattcattcatgacgtcaaagcggtcttcctgcaccatgccgccgtgaattttatcgcaagggtagcccagcctgtccagctcatcggttaactgaatgaccctttcttttgtccggcagaatataatgcagctgtccgggttttcggtgatcaggacatcacgcagcaaagatgttttgtcctcttcttctgttctggtgacaaaatgctcaatgtcttttgtcgtcaggccttccgcttttacttcaatcaattcagggtctttcatatatgtgcggctcagcttctcgacgtcatccggcagcgtcgctgaaaacagcatggtgactctgtttttcggcagatgctgaatgatggcttccacctgttcaataaatcccatattcagcatttcatccgcttcgtcaatcactacatacgccagccgttcaagcggcagcgtccctttttctatatgatcaagcacacgccccggcgttccggcaacgacgtggcttttttgcttcagttcggttttctgtttgtcaaaagaagcttttccgaaaaccgccgtggcttttatccgtttgaaacggccgatattcgtgatatcttctttaatctgcgccgcaagctcgcgggtcggcgttaaaatcagcgcctgcggtttgttttcctcccattccgcaagctcgcagatcggaatgccgaaagctgcggttttgccgctgcccgtctgcgatttgacaacgaggtcttttttttgcagcgcggcggggatgacgcgccgctgcacttcagtcggctcggtgtattgcaagccattcagcgcccgtcggatttcggggctgatcgcatattcattaaactcattcatgactaaactccttctctgtccggctcccctcattatacgcgaaatgccgccgctttaccctgacgttttgccgggccattcgggggactgctttttcttcatgtcaagcacgacccatttggcgcaataaaagctcatgcttccttccccgtcatcgacatagtagcggatcgattcccagccgccgtcgaccgggctgatatccagatggatgtcggtgatgctttcaagatcatccagccgggcagccctcacaccctcaaaacgcagcacggcatcatactgcccatcagtcagattcagctcaaacaccgggattttatcataatactcgttatacccggtatagaacgtaaactccgtcaattcaaaacaccccggcgaatccggccccagcagaactgctttctcatgtttgtgccattccattttgtgcctccttacttaacaccttcttctctgctgcttcatattgacggcagtaaaagcggaacgtttggttctcccactcctccacgagaaaatgctgtccatcatcgccgtcagcaggatcaattgctacaatgcctgagccagccgtttgactctccattttttttatttgaacggaagaaacgtctttgcatgtgagccttacacgaatgagatgatgttcatactcggaggaaaatgccaacccaattgcagaaatctccccttcccggttgaggcggaattctaaaagctcctgaatcagccacttattctctttcattttctataaattctcctatagaagcggcatacaactcaacgccgccagtctcatgatcccacagataaacagtctcctccattacgccgtccgtctttttcaagcacagcttatctccggttccgttgtcggcaattacgatcatatcgtcgggcatactctcttctctgcacacactgttttgcctgatcacatcatcccaggttttctgcaaacggctttgttcacggatagggaaaaaaatccactctccgatccccgcagggttctttttatgaagtagccgtttatacgctttcggaaaagacgctctcaagcttttttccgcagccctgaactcttcttctgtcatcctgttattcctcccccgtaaaaacatgagattcattcgcaagcggcattcacttttgaaataagacaggagcgtttctttctatcgcccttattagcggtgagccaaaaaccgtaatggtttgctgccgcggatcccctagcagcccccactggaagtcctgatgaataaagaaacaatagtctccgtttggaataacggagaccagccattcaccgaattcatctttatcaattggcgcatgaggattaaatagataacattcatgctgccagtccagcgcatatataaactcttgctttaaggtacaagattgaagtgcctttagtatctgcagctctgcatcttccaaaaaactgatattccctttttcatcattgaatccttgagatacattaaagacttgaaacggcttcggaggttttattgaagcaaatgtactgtacggtttccatttcactgcgcgattcaccctgcgccacaagcactctgtctcctcttcactcaaaccatgccaattcatatatttctgcctcccgcagttccgaatctggaatttatattaaattaatcaatgatatataaatctgctgcatcgtattcaaaccaaatgattttttcattattttcagtagttacatcaaccttttgagtattcaggttcatgtaggacttatttttggcagggtttgctattataacaacaaactcattgatcgatgctaaaaaatataattcatctaataagtgatctgccatcaattcttctttggttagggcacattcaatatgagttaacttcttcgatacagtattcatatttatcattttcttttcaaccttcttcttccattcttcaataaaagaagggaatgccattacttctattagagctgtttcgaactctaagtcattcattaattgagaaaaagtatctttactcactagatcacatgaataaatcgaattgtattgaagcggattaatcacatccagattccctatagccctcaatgattctttttgtaaatttaaaggagtgttcatgtttacctccgcgaacgatttcgttatgtaagaaaagagaggctgggaacctctcttatttatgatttcgaatgatacgcataaaatgattgatcatcaaagcgaactgtttcagcttctacagcaatcagcattctgttcatgccaatgagaaaattagcatttgattgatactcaggaattacagcatttgatagatttccgattccttcctggtggtaactcatctcaaatacttgccaattgtattcttcaggatctattttttctaatctcatatcaccaatatctgcactaaaataaacagatgctgcatttttaacaacctgaaccttaaaacaggtcttttttaaagaactgataatcgacctttaaaatattacatccctcgtcaatataatctactctattgttcaatttgtttgtgcattgtcttctccttctcctaactaacactaacaaacccattgatagaagtgtcttgatgataaacatagattattcaaacaagccccaaaaatatattactctgcatatttgtcattaaatatctgttgaatgcaaaaatactatctggagattatttgaaatcccgtttagaacaatcagatgatatcagtagtaggtattaaaaatatacttatttgtaatgtgccgtaagtgttttttcaaattcaactggaaccgtctgatctgggaatacaactgatatccaatctaagacaacgccatctaacgatctccaagttgctagttcttttccttcactctgatgatcaatacctagaatacagatttcaagttctctctcaccataaatcgcccactttaaagtcggtgaagcccaaacaacacgagatgcaatattcattatacagtcacttttactgtgctttggataatcagttaagagtgacagatactcatctgcagttatatgcaaagggatctttatccagttaaaatactcaaattcttcgtagaattggtttatatgttcagaactgtctataacagccattaatataaactcatcatgatgttcattagccaaactcttaaacattccccaactttcttcagataatacccaatggaattcctcgaataaataataatttttcctttgcttaaaaacttgtttaggcaatgtttgatctacgtgacataaggaattaattatggattgatagacttttaactccttaggatgatcaataaaatagtgattcatcttatttcccctttaatgtcgcattctgattttgtgtgtgaatttttttctacctttaggtgtatattccgcggttggatagggacttgacttagcatgtttccttagggaatacttattcccatttttcgtcatagtgataacacccccatgatgaactgattttctccatccttgtcttcttaaatttttttcaaaagttcttctttttacattagtagaataatttttgaacctagaagtttttccagttatatccctataacttgagtaggcccttctagcccgtacactttttctagatagtttatatgttttagcagctttataaatccgattagcacccttaaataacttcccaggcccaaagttcgaagccgctgcccaggctgcacctctccatcctttacctgatttatatgccttatatccatcataggctgcaaatccggcatttaccacaagccacacccaatgcccgtcaggatcgacgttcatgactgggttgttgtttccgtatgcatatccattctgatctaaagaatcgccgtcacttcccgggtctgggtctagtgataagaatacgccgtttcttggctcgtagtagcgggccatgagatagtacaggccggtttcttcgtcgtattggtagcctgcgtagcggtagcggttgtcttttacttcgtcgctcgcttcggtttttgtcggatttccccatgcatcgtattgatatttggcaacggtttttccggtgctgtctgagatggcgatgacgtcgccgtgtgcgttgtagtgatagaaatatttcttgccgttctttgtataggataacagctggccgctgtcaccgtacgtgtatgattttgtgacgttgttgtctgcgtctgtttcatacaggacattcaagctgtctccgtcgtagaagtagttcgtgacgtttccgttgacggttttttggattctgtttcctttttcatcatatttgtatgttgcgaacggcttgtcttcgccttttttcgtgacggcggtcaggttgtcttccgcgtcccacgtatatgtgtatttgccgtcagatgtgcggttgccgtttttatcgtaggacaggtcttcgtcattcaccttcgtcagctgattcatgatgttgaaggatgcgttgactgatttgcttgcgccgtcctttgtggtggtgacgtttgtccggttgccgaagccgtcgtacgtatattgaatgacggtgccgtcttcatgagtttctttgacgagctggttgagcttgccgtattcgtactgcacctttccgcccgctgagctgtcgatgaccgtgcggttgccgttggcgtcgtattcatagctttcccggaagatgctgccgccgtttttcgctccgatatgaagagagctgacgagattccgctcatcatatgagaagctcgtgccgacttcatttccgctgatgaatgtctggacattgccattttcatcataatcaaatgtataggctgaagtgccgtctttcatttcaatcatttgatcaagtttgttgtacgtaaagctgtttgttcctttttggccgccgtggctccatgagaaagttttcagcttatccgaatcagccggatacgtccagctttggctgccgccgcggtcggttaattcggtcaggcggtttttgttgtcaaaggtgcgttttttcgttgtattttgttctttgtttgtgaccgacgtttcattgccgtttttgtcataggtaaagttgtatttttcagtgccgttatacgcttttgacttaacccggtcggtgccgtcataggtcagcgacacttcattgccgttggcggaaacggttttcgtcaagttactgttggcgtcatattcactcttcagtacattgccgagcgggtcggttgttttgacgagcttgcccatgacgtcatattcatattgataggtctggtctgcgctggcccgaatcgtttttgtcagctcatttccttccttgtcatagctgtgaaggatggatgtgccgtttgacaaggtcagctttgtcagctggtcggcctgatcgtattcgtaggcggttgtttcgcctttcgcgtcggtttcagacattttctttccagtctcgtcatatgaagcagtgcttgcataacctagttcgtcttcttcttttgtgacgtagtttcctttttcgtcataggtgtttttcgtcaggatgcttccttcgattaaacggatgtcgtcaaaccacgccgttcctgttgcgcttttttggaacagaatgctgatttcgattctattgatcggctttgttttcggaatgactgccgccgcccggttccattcctgtgtcccctgcgggaatttggcggtgtatacgcccgtcgtgccgtccgcataagtgacgtcagcctgaagagcgtaatcattgtcgttcgttaattttacgccgtcagccttggacatccctgtcagcgtgatatataccggcttatcgtccgcgctttggcctagcgtaacggtttgttttgcggccgcattggcttgtgatgcatttgtgcgggacgcttttaatgagctgtcatcatcgaagccttcatcaaggtcagcggcggctccgcttgtgctccagccatctgttttggccgtgaaactgctgttttgcaccgggttatagcttgaagagacttcgcctttttccagctgaacctgatcaaaccacgcttttcctttgccgtccttgtcgttatgatccacttccatatagacgatggcttttcctgcattggccggtgttgtaaaggtgatctgccgtttcgtccagtcattctttccggctaatgcgcctgattcattgtgaatccattgaatgcgtttttggtctttgtcacgcagatcaatgttgaaatacgctcttgccttcgtcagatccgttttgatctggccgctgagtgtatacgtcgtattcggctctagctgcacttcctgcgttgcggacgcatggccgtgctctgttccggctgaagcggattgtgacgagatctccaatgctttttgtccggacagcgcgccgcttcttgcttttacagatgcgatgcttccgctgtctctcgtagcagtgagattccagccaagctttgttccttcaaagctgccgtctttcagcaggcttgccgaagctgccagctctttgcttgattgaatgagattaccgtatttgtcgtacacggcggcggatgaggattttccgctttgatccgtttcagaaacggcatcaagtccgtcgtacgcaatatcagtgacgttcccctcggtatccttcattttcgttacgtcattgtttttgttgtactgatacgtttcggtgccgtagttgtcttttacggctgtgacgttgccgtctttatcatattgatagctttctgtcgctttgcccgcatccgcgtcgttcggatcggtgtcctgaatgacgttgttgccttcgtatacggtgttggtcgtgattttcagcccttcggcatcatcgatcatctgaatcgggttgcccgcttcgttatagccgtactgcactttgcggccgttcggctgcgtcatgagcagcgtttttttgtccgcgtcatagctgtagtcgtacgtttcttttttcgcattgacggctttggccagacggtggccgctgtattggtattcagtgaacagcggtttgtcatccgtgctgtttgcggaatactgcttgacgaggcgcccttcggcatcatagtcgtagcttgtgacgctgccgtcagtatccgtcacctttttgagaaggtctttgtcatatgaatatgaaatctttttgtttttcggccctgtaagagatgtgacatggccgttttcatcataggtaaatgtcagcttgcgccctgatgcgtctgttatggcggtcagctgattgctgtcgttatattcgtatacggttgtattgttgtgtccgtcaacgattttttggagctttccgccttttttgctgaaataagcgttcgtctgatcttttgtttttaatacaaattgatcgcttgtttccgtcagttcgagataaacgcccgtcggcggctgatacgtgccgtcagattttttcgtgaagacatgtgttgtcgcgtcctcatcaatataaacggctctgccgtcttcagaaaggatcgacgtttccgcatcgacataccagccttggccgaacatatggtcagagctgtcaaggctgttaaaggtccgggagagcccgagccccggcccgcgtccgtcgattgacatatcttcctcattgacgatgacatttcccgtcgcgccgttcagctgtccgtccggaatgtcgataatagaccagaattcttccgttccgaggaattccgccccttcatggaaaacagggttaaaaggtgccgtcggtatgctgtcaccgtttgcgtcataggcggtcagcgtgaaggaatagttcttcttccctttgtaattgccgtttgcgttttcgtaaacaggtgaagggtcaagcgccagttcgccgccctttccgtccgtgtgaagctggaatcttcccgctttcacttcatcagctgacggccagatgcgtttgttttgggtcgtccaatgatcggtatccccgacatcgaatgattgatagtcttttccgttgtaaatgttgattttgtagcctttggcgtttttgaccttatcccatatgagattgacataacccgtttggctcgatttcgtgttcgtatagacatagcctgtcaggtttttcggctttccgatatcaggcagcgccggactcgcttccggtgaggcgatcgcttctccgtctttgttataggcgataactttaaatccgtaagttttccgatttgcatctccgccggcgtttttataaacggggcccgggttaatcggcaattccgcgccttttttgtctttcaggtgaagcgcatattttccggcgctgatttccgcctttgtcggccagatgttttgatcttttgtggaccaggatgttttatttccgaggtcaagcgtttcaaagcctttgccgttaaagacttgcattttatacccggctgcgcctgatacggctttccaggaaagatcaaaccagcctgtggcgttgttgttattaaagcctttcgtgcttggtttctgaactcttccgatattcggaatgacgggcttggcggccgcagacatggcgccttctccctggtcaaacaccgcgctgaccgcgacccagtaatttttacttgccggatagctgccgccggcgtttttatagaccggcgaaggattaagcgctaattcacttccgccttttccgtctgtatgcagcttatatttgccggagtcgatttccgcttttgtcggccagatgttttttccttttgtgctccaagaggttgcattgccgaccggaatggcctgatattctttcccgttataaagccagactttatagcttttggcgccttcagcttttttccagctgatattgaaaaatcctgtcgaatctccgttatgatacgctttgacagacggcgtgtccgccttcggaattgtgtatgtcacttcaatgtatggttttttagcggaatttgctgatgacatcagcttcttccaatattcttttccgttgccgtttgcgtgaagcttaaagccgtaattggcgccgccgctgttccacgacttgactgcggaggtgacatcgaagcttgcccattggcctttatagacctcggctttgccgatgtttttggagcccggcttgttcttccacgtaatcttggcattgtcgtaattgctgttaacggtgtcgagccaaagccccgtcgcttttgatccgtaataggagtgggctgtgtacgctttgagcgtcgctttcgtcaccgtcatgtttttgatcggctttagattatcaaacttcataaaagcgtagttcgttccggttgtgccgtcataatatccagttttcagcacgtacgctttcaatccggcatcccatttctgcgatgcggcagagtagtttgtcgtcgggtacgcgctcatgacaaaggtatcggatgacacagatactgatgttgaagggtcaatagataccggataaacccgcttgggatctttcagccatttttcatcggccgttacatggagcaagtagccttcactgtttttttcaagcttgaagctgacatcttctgacctgctgacttcacctgacttttcgtcgagttctgagtcggtcataaagggcttcggcacggtgtagacgacattgtctttatcatcagaaaacgcgatcgagccgtcttcctgttctttagcctgaaggtcggttttgatttgaaaggtgaaggaattgtagccttcatatttgtgaagcacaaggtcttcttttatgttttcgttaaatgtgtaggtttgtaaatcaatagcaggaaacacttgctgatacgtaagctcgttgctgtcttcccttacttttgctgaggcatctgtcggagtgattgcagcctgatcggggccttttgcgccggttaatgagtatgtgagcttatgatcatcatgttcaaatgtagcgtataatccgtttttcatttgcttcagaaaatcggagttcagcactgtattttccgtcccgacttcctttgatccggttttcaattcaggggaaacgtcttcccagtccgcattggcggtttctttcgtatgaatggggtctgtgtagatttcctgtttgtacacaccctcgccttcatagtaaagctttgaattctcagttctttcagacgtgatctcaccgtcttgattgatatctttttgatcaaacggcatctgctcgggtgctttttccgccggaagatctttttccgggtctgcggccggaatggcggcggttttcgcttgatcttgtttttcacgcgtttctgccgcaaacacatcggcaggcgcaatggaaatcatcagcgttgccgcaagagtgccggccagccattttttccacttgttcttttttcctattttcataggttctcctccttcttttgtaatataggcttaacaatagtaatattattgaaattgtttatcaatattttcctaggtatttaaggttattttaaggattatagggattttgaaccttttattcatataaaaaaaccgccggctgccggcggtttttcgtattatggatagcggagatttgtattttgcgctcccgcgtaggattgggcgaagtttttggcgtcctgggctgaaagggtgccatagctgtaatttgatctcggattccagccggtgcgcggtgatttcggggctttgagcgacgggaatgaaccggtgtcggtgaattgggccgtcccgtagtcgtctatcattccgcctttttcatttccgttaccgaagtagttggcttctgagaaaacagtcgcgtttgtatgaatggtgaatcctaaattgaaattggtcacatagttgtttttcgcgtgaaaatagccgtatctcatcaggcccggtgaacgcacatagacgttattaaaatagttgttggtgatcgtcatatgcggatagccgatataattgcgtccttcgttatcatcattcggataaccgagaatcaggccgtacagatggtctgtgaatttagagttagacagcgtcacaaaatccgctttggcgccgacatacagaagctttcccaaatcactgtggctgttcggattgtagctgtgtccttcaaaccacacgtggtcaatccagtaattctgtccgttcgctatgtacatcggaatgtcgttgttgcctgtaatggcggcactatggctgataatgagatttttgaaaatcacattgtttgagccggagccggtggtcagatagatgttggtcagcctgtggctggtataagagccgacgatggttttattggcgccgactgtcacgacggctttacccggggaagaaatatcacttgtgatgacgatggttttgcgatccgttccgcccgcattgtttttcaaatcattgagattgctgacgtagacgacggggccgccctggcctcccgatacggcggattttgctttaccgttatgatccttcgcattgcccgcgaatccggtaagtccctgcatcacatccggataagccgctgccgcttctgcctgctttgatgcggaacatacgatggccagacaaagcgcaaatccgaatgcagccaagaaagcgagatgacgcgtcttttttatcatgcccttcactcctttaatttcttaaattgtaaacacaagaagtattatacaattactatcctctttttccatgatctgtttgtctgctttttcgttatggctgaaaagccccaaaacaaaaaaagcagccggtacggccgcctatatacgggtgctgtctgcctgagcttccgaaggcacggctttttgctttcgaatcagggacagcgccattcccgcaaaaatcaacactatccccaaagattgataaaggtcggggcgaaatcccgtaaatacggtgtcgagcacaatcgccaccgccggatcaagaaatacgatgattgaaataaaccgggtggataaaaaccgcaagctgtcaaaaaagagcaaatacacaattcccgtatgaatgataccggtcgacacaatcatgatccagttcacatgcgacaaatcagaaaaagcgccgaaacggacgaacggaagaagaatgataacgcccaatccggtctgcaaacaggtgacggcgtatgggctgaggctgttgatgcctttcccggccagtgtcgtaaaagcataaaaaagggcggccagcacggcccaaataatacccgatcccatcagctgagaaaatgatgtacttccgttgatgccggaaatcagggcggtgcccagaaaacaaatcacgatggaactgacggacacaatatgcagtttctcccggtatataaggctccctagaagaaggacgagaaccggagccaaatgataaacggaaatcgctatcgtcactgatgtctcctcaaatgatttaaataaaaacacccagttcagcacgagaaaaaatccgcaggccagtgtctgcagcacctcccgccggttccattgttcggtgcggtaccgtccggaaccaaaccagcagacgcccagaaacaatgaggcgcacagacatctcacaaagaccagttcaattgaaggcacattcgtatgttctgagaaaaagccgattgatccgaaaatgaccatggaaatgaccattttgatgacggcatttgatgtttgttcagcttgcattgatttgcttcccccatatcattgactgtttattcagacaaatactaacagccattttacttgattcagaggaagatttcaccctatttttcgaaagccggcggtcttttctcatgaaaaaagccctgcatcagcagggccttctgtttaatgaacgatcagtacaggacaaggagacaattgtgagaccttatggctcacgcttccgagcatcatttctttaaatccgctgattccgcggcttccgacgacaatcagattgaaatgctgttctttcgctatgtttaaaatttgatgcgcaggttcgccttggacgtacaggctttccgcatttactccgctttctgccgctttctgcttggcatcttccagaatggctgctcctttttgctcgacttcatgtttgatgtcttcaatgaagttttccggaacatagacaatcccggttaaagctgatgtggagacaacggcttcacgtcccgcatagagaatggtgagttcagcctgctgttctttcgccagatggatcgctgcgtccagggctttattgctcatgtctgaaccgtctactgctgcaagaatttttttaaacatatgaatcccgcctttctgcttttattgtcctcctctctttgctgaatgtcaattttgccggctttctccggaacattgcgcttacagactttctccgtttgtggcgatgacgtctttaaaccaataaaaacttttctttttctttctttcaaacgtgccttttccgtcattgccgcggtcgacatagatatagccgtagcgttttttcatttctgccgttgaggcgctgacgaggtcaatcggcccccacgacgtgtagccgatcaggtcgacgccgtcttcaatcgcctctcttgcctctattaaatgatcacgcagataattgatgcggtagtcatcctgaatggttccgtcctcctccggctgatcaaccgcgccgagtccgttttcgacgatgaagagcggtttctgataacggtcgtacagcgtgtttaaggtgatgcgcaagcccttcggatcaatctgccagccccattcggaagatttcaggtacgggtttttcacgccgccgagaagatttcccttagattgcgccagatcctcaggcgccgtgctggccgtcatcgacatgtagtagctgaagccgatgtaatccaccgtatgttctttcaggagcgcctcgtctccttccttcatctcgatcgtaattccgttttctttaaagaagcgtttcatatagcccggatagctgcccctcgcctgtacatcagaaaagaacagcgtgctccgctctttttgcaaagccgcatatacatcctccggcttcggcgtcatcggatacgtcgtcgttgcggcgatcatgcagccgatctgtgaatccggaatgatctcatgaccggcttttaccgccagtgcgctcgccacaaattgatggtgggccgcttggtacatcgtgttttgtttattttcgccttcccggaatataagaccgccgccagtaaacggagcgtgaagaacaacgttgatctcattgaaggtcatccaatatttcaccttgtctttataacgggtgaaaaccgtgcgggcgtaccgctcatagaaatcgaccgtttggcggtttctccagccgccgtagtttttcacaagaccgagcggcatctcatagtgagaaatcgtgacgaccggttcgatctgatgttttctcaattcgtcaaacaaacggtcgtaaaattgcagcccttcttcgttcggttctgtttcatcaccgttcggaaagattctcgtccacgcaatggaggtgcggaacgctttaaagcccatctccgcaaacagggcgatatcctcttgatagcggtgataaaaatcaatcgcgtcgtgatacagattcagcgcatcgtctgtctcatgaaacggagacataatgccatccggggagacatccgccgtagaaagtcctttgcctccttctttataagctccttcaatctgattggcagccgttgcgccgccccataaaaaaccttccggaaatctcttcatgttttctccacctctttttcaggataacgccagaagcgcttcgttcggtttgaccattccgctttttttcacgtctgtaaatgaatattgatccgtattcgtaatgatgaccggcgtgatcacgtcaaaaccggcagcctttatctcgtcgatatcaaaagtaatcagcagatctcccggtgcgacggcatcgccttctttgacgtgcatctcaaaatgcctgccatccagccggacggtatcaagcccgatatgaatgagaacctcggctccccgggtgctcgtaatgccgatggcgtgcttggttttaaatacggctgtcaccctcccttctacgggagaaaccgccgcgccctcttcaggcagaatcgcaaaaccttttcccatcattccgccggaaaagacgctgtcgttcacttcgcttaatgctttcacttcgcctttaatcgggctgtgaatgatttctccgcctgccgtcacccccggcgcttcagacgctttgtcccgttcggactgtacatcctcaaacccgatcagcagtgccgccgcaataccggccgcaaatgagataaaaagcccgatcagcgcgtaaagaaatgtcggcccgataaagaccggaatgctcggcagaccggcgtttccgccgacaatgtaagaagcgacgcccgttacaccgtaaaaagctccgcctgccgcgccgccgattaatgctgccgcgaacggttttttcaatctcatgttaacgccgtacatcgcgggttcggtaatgcccatcaatgccgtaatgcccgtcgtaaacgccagcgatttgaaggttttgtttttggattttaagaaaaccgcaaatgacgcgccggcctgccccatattcgccaaaaacatcgcgggcagaatgtaatcatgtccgttttgggcgatgttattgatcatgatcggcacaagcgcataatgcataccggtcataataatgagggaaaatgtgccggcaagcagaatcatcgcggcaatgcccgcatgattgaacaaatcattgacgccgacagacaggtaattcccgagaatcgcgccgagcgggccgactgtgatcaaggtgacaggcacgacgatcacaagcgtaagcatcggaacggcaatcaatttcaaagaagaaggcgtgatgcggtcaattcctttctctacataggacatcagccatatcgccagcaaaattgggataactgtcgatgaatacgtggcagcggttacaggaagaccgataaaggagatgcttttccctgctccaagcagggccgttaaatccggatgcagaatcgcacccgccacagcggccgccacgtacggattacatctgaattttctcgccgcgcttaccgcaagcaaaagcggcagaaaataaaacgcaccgtcaccgacagccgtgagaatgctgtgagtctggctcttctccgacaaccagccgaatgtcaccgctagcgcgacaagcccttttatcatgccggctccggcaatggccggcagaatcggtgtaaacacaccggaaatcacgtcaaatacggcactcagcacatttttcttctgcttcgaagttttgtttgcgctttcatgactgagcccgctgctctccatcaaagccttatacaccttcggcacatgattgccgacaatgatctgaaattgcccgccgctgatatttgtccccatcacgccttccgtttgctccagcccgcgccgatctgctttcgcattgtcatacagattaaaacgaagccgcgtcatgcaatggatgacactctgaacattctcctccccgccgacaagttgtaaaatctcttttgatattttatgatagtccatgagtatacctccttaaaaatgggggaaccgccggacgaaaggtgcccgcctttctccggctttttttgttatgaaatcagcatcacctccgaaaaaagggtataaaaaaacctaaactgcacagcacacgggggtcttcccctgtctgacgcaatttaggttttgcctgcggtttgcagtaacaatcctaggtgaatgatattgggttgatatgtatactttagcactggatttattgggtgtcaacgcttacatttcaaaagatgtactaattaaatatataaactactatattaactaaaagaaccctcatgttaagtacctctgataaagtagttttaagttaaattgcgccctaattcctcttctctactttaatttcacacttctctagtttgtccacaacggttaaagtagtacctgcttccagttgataagagcaaatactagatcatgcagtcaattcaagcccattacctcaacagtaaccccattttcaatgtaagaatactccatactccaccaaactacctcagcgttattttttaaacgcttaataaataggactttattctcttcttttttagtattacctattggtaagagtagtgataaaatggaattattgatataaaaaaggagattatgatgagaaatcatagaggcttccatgaggaaattcagcaacaacaaaaactttatccaacatcacatcgcattcaaccggttagccctaaagaatatgcagaggttttgactttacatacggcaaaacaactgagcgagacatttcaaacacttgtggatcaagatcaatatgaacaagcgattcaactgagcgagaaagttgcctctcagcttggacaacatacgaatttttcattaccactttccacagtgctttatagtttaaacgaaatggaacttcctatttcagaggaattttctctacatcgtctgaaactgctaggaaatcatcaaactcatgataactttttcaaagcattaaaacacgagatgttaacggcggatcgggtagactttatggttagttttacaagatggtctggtgttcagcttttgatccctccgcttcaggagcttgctaaaagacatgtccctgtacgcatcattacatctacctatatgggtattacagaaccgaaagcgttaagacatcttcttcaatttgaaaatgttgagttgaaaattgtaaatgaatataaaaaatctttccatacgaaagcatacttatttgaacgctgttctggacagcatagtgtcattgtaggatcttcaaatctatcacaagctgcacttacgaccgggtatgagttaaatgttagactacctgaaaccagatatctccccgtttatcaacaaacaaaagatttgtttgacactgtttggaatgaaaagacacagcctgttgacgaacaatttttacaagcctatgaggaattccaagcaggaagccaaaaggtaagtgcttcctttgctgctcaaaactctctttacaaaacgaaattgtccccgaatgccatgcaaaaggaagcgttacgaaaccttaaaaaaacaagaaacgaaggggagacaaaggcagtcatcatcgccgccactggaaccggaaaaacatttttagcagcatttgattttgagcaatttaaaccaaataaatatctttttcttgcccaccgggaagagttacttacaaaagcaatcgaaacattccagaaagtcaccaataatcatgaagattttggtttattgactggaacgaaaaaagaaagagataagcgttttttatttagcactgtacaaacgctacataaaaaagaaacattggaatccttttcaacagatgaatttgactacattgtgattgatgaattccaccatgcagaagcatctacctatcaagctgtattaaactactttacaccaaagtttttattaggtttaactgcaacaccagagcgtcttgacggtaaagatgtgcttcagatttgtgatcataatgttgtttatgaaattagactccgcgatgctctaaaggcagagctacttgcaccatttcactattttggaatttcagatcatactgtagattacgaaaaagtaaaagtgaaaaatggactgtacgaagagaaatcgctagtagatcatttaaaaactcataaacgagtagaatatatcattaagatgatcaacatgtatggattccacggcgagaaaatggttggcttaggtttctgtacaaacgtcgaacacgcaatatacatgagtgatgaatttaataaattgggattttatacaacttacttaacaggaaatgattctcctgcaaaaagacaagaggtcattcgtcatttggaggacccgcaccacagtttagaacttatatttacagtagatattttcaacgaaggaatagatattccaaaactcaatctactattgttccttagaccaacagaatcaccaacgattttcattcagcaattaggacggggacttagaaaaactgacgacaaagagtttgtaacgatactggattttatcggaaactatcaaaagtcattcgttattccactcgcactatctggacaaacaagccaaaaatcgtttgataaagattccctccgagtggccgtgacgcatgagttttcagatttacctgggggatcttatgttgacctttcagccgtaacgaagaaagaaattttaaataagatcgatcatattaaactaaattcagatgccatgctgaaaacgttatacaagcaatttaaacaagagctaggacgctctccagaattaattgattttctatactctgaacaggcacctgggcttaccttttttataaagaaatacaaatcgtgggtacagaccaaaaagaaaatggacgatttgaatgttacagatgaaggaattctcaataaccccttggttgtagggatagtagcaaaattagaacagcaattacctattaaatggccttatgaatggttaattttacagagcggttttcacaaaaatatcatcacaatagaagatgtaaaagaatcgttagaaaaacagtttcatattcaaatcacaacagatacacatgatgacctcattcagcgagcaatggagcgtttaacgaaatcagatcaaaaacagaattggcgctttggtacattacaaggtgatacattcaagttagatccagaagtgagcgagatattaaacgatccattattcggaccgtatattaaggagcgcctccactatggactgattgaatttagacgtatgaacaatatagaagctcttgcttcaaaagagattaagcttacaatgtatcaaacctatacaagaaatgaactcatttatctttttcagtcaactgatcaggaagggacttggcgagagggtgtacgtagagttaaaaatcactatttaatctttatcaatttgaataagtcagaaaaagtagaagatcatttgctatataaagattattttattgatcctagccattttcactggcaaagtcaaaaccaaacctcacatacatcaagcgtagggcaaaactttattcaccataaggaaaaaggataccatattcatttatttgtgaggaaattcactgaaatgcacaacatcactttaccatttatttatgtaggagaagcggattacgtatcaagccacggagacaagccaatgaatgtcaaatggaagctccatcagcctgtcccagaaaacttgtatgtggatttaacgaattaaggcagagacggtcggaagatcagcgggtgcccactctagtgattctagctcacgtataggcacccatctgaattccgcatgctcttttgctaccggctcccctgatacaatcttcgcttttattgaaattaaattgacgatgaccttctcatattcatgatgaatatcggctattacatcgcccgcaacaattttacagtcaagttcctcttcaatttctcttacaagtgcttctcgtgcattctccccttcttcaagctttccaccaggaaactcccacagattaggcagagacattgttggagaacgtagagcacatagaatttcattgttttcattttgtatgactgcggcggctacttttattgtttctttcaaaattaaacttcctttcgttttttcttaggtatgtattcaaatttttcaattttatactgttcactgtaaacgatagaggttgaatccatcataattcaaatggtttattaaaagcaatagaaggtcattctcctaattagcaagaaaaaagcaccctccaaaatggagtaggtgctaatttacttcactccccaaacagcctccccatcaccgctcagcacactaaacgtcacaacttctttctctctcgctgagtcccattctttcaggaagacgccgtcataatttgtgccgttcaggttgattcgggctttgttgctgtccgttattgtccaggttccggtcatttccccggaaatggtgccgtcgttgttaagccggatattttttggggttttgatcgtagctgtaatgtcttttccgtgctggatgagtttgtaggctccggatgcggcggatgccgatatctgtgtatccggttctcccgcgtagcggtatggcgctgcaacgggccatccgtctttgttcatgtacagccgatgtactctgacttcgtgctcttcgcctctgttcgggaaacgggtgtggaaaatgaggtatgatcgtttcgttttcccgtcgtaaaacacggagttgtgtcccggcgatacgtagcccgtgcctttttcagattgtgaggcgaagctgtagccgcccatgagtttgaccccgtacggttcaattgctttgtcgtcgaagaaactgccgtcttttcctttggcatcaagcatgttatggcctgcggcgtcatagtacggaccgtccggatttttagagcgcgccacacgcatatgataaccgccggctgcgtcaagtccgccgaatgacagatacagatagtaatatttcgtttccggattgtagctgatgtacgggccttcgattctgctgtgatttccgccgagaagtttttttccgtagccttggttcgggagcgggaaaccggttttcggattcatttccagtatgaaaattccgccggagtaagagccgtacaccatccagagcttgcctttatggtcaaaaaacgtttgcggatctacgacgttcgggtgaacgtttgcattatacgtcgtgccgtcttcgctttttccttccatgcctgatttcaaaaagatgcctttgttcttgtagggtccttcgattttgtcactcacggcgacaccgagagcggatcgcggcgagtctcctttacaggcgttatagtacatgtaatatttcccgtcagccagctgggcgacatccggcgcccacaacgtatcagactgggcccagtcgaatgtctcttttaattcggtgtagacgttcgggatcaggggattattggaattgacgcttgaagacatctgctgccactgcatcaggtttttcgacttggcggaagccaaatgtgagccgaatacataatatgtatcgcctgttttaatgacggacggatcatgcacgctgacctctgaaaaaaccggatgctgggcttttgcctgcggcagagtgaatccgatgaccgctgctgagaccaggcacacacgaaagaaactggttttcattttctgaaatctcctcgctctcttcttttcttaaaacgctttcaagacaacgctccattttatgatgcggatggcggaaatatgtgatcaacagcgccggcttcgcgatgtaccgctttacttcgataacaatctgatttgtgaaagactggaaaaaaagttttgacttctgattcgcaaacacttaatataaaaaacagttactagttatcagaatatttaagaattgagtgaagcatatatgaccttacacaaagaccgccgcatcgggcgcttatccgtccttcttctgcttcatgagactgaagaaaaccagcagatcagacggctggaacgggacggctggaaagtctgtctcggcagggtgggttcaatggatgcgcataaggtggtagctgcaattgaaaccgcttccaaaaagagcggcgtcattcaatctgagggttatcgcgaatcacatgcgctgtatcacgctacaatggaagctttgcacggagtgacgaggggcgaaatgctgcttggctcgctgcttcgtaccgtgggcctgaagtttgccgtcttgcggggaaatccgtatgaaagcgaggcggaaggcgattggatcgccgtttcactttacggcacgatcggagctccgattaaggggcttgagcacgaaacattcggagtcggaattaatcacatatgaatcagcccatagatttcagatgatagggggctatgcgtgaaatatcattttcatggcatagctcctttttgtatgggcgctttatcaaagtaaaggaaaaggggttgaaatgatggtgacgttagacggttcctcactgacaaccgcagatgcccagcgtgtgctgtttgattttgaagaggttcaagcatctgccgaaagcatggaacgtgtgaaaaaaagcagggcggcggttgaacggatcgttcaagaggagaagaccatttacgggattacgacgggattcggcaagttcagcgatgtgctgattcaaaaagaagacgccgcggatctgcagctgaatctgattctttctcacgcgtgcggcgtcggtgatccgtttccggaatctgtatcgcgggccatgctgcttttgcgcgccaatgccctgctgaaaggcttttccggcgtgcggactgagctgattgatcaactgctcgcgtatctcaatcatcgcattcacccggtcatcccgcagcaagggtcactgggggcgagcggggatttagcgccgctttctcatctcgcactggcgcttatcggtcaaggcgaagtcttttacgaaggggcccggatgccgacagctcatgctttagaacagacaaaccttcagccggccgtcctgacctctaaggaaggactcgcgctgatcaacggaacgcaggccatgaccgcgatggggctgatcgcttacctcgaagccgaaaagctggcctatcagtcggaacggatcgcgagcttaacgatcgaaggccttcagggtattatcgatgcgtttgacgaggacattcatgccgcccgcggttatcaggaacagatggatgtcgcagagcgaatccgctattacttgtcagacagcaagctgacgaccgtccaaggggagctgcgtgtccaggacgcctattcgatccgctgtattcctcaagtccacggcgcatcatggcagacattagcctatgtaaaagaaaaattagaaattgagatgaatgccgcgacagataacccgctcattttcgaagacggcgccaaaatcatctcaggcggaaactttcacggacagccgatcgcctttgccatggattttctcaaagtggcggcggccgagcttgcgaatatttctgaacgccggatcgaacggcttgtgaatccgcagctgaatgacctgccgccctttctgagcccgcagcccggcttacaatccggagcgatgatcatgcaatatgcggcggcctccctcgtgtcagaaaataaaaccctggcccatcccgccagtgtcgattccattccttcatcggcaaaccaggaggatcacgtcagcatgggaaccatcgcctcaaggcacgcctaccagatcattgcgaatacgagacgggtgcttgccgttgaagccatttgcgcgctgcaggccgtggagtaccggggtgcggaacattgcgcctcgtacacaaaacagctctatcacgaaatgagaaacatcgtgccgtccatacaagaagaccgcgtgttttcttatgacatcgagcatctgagtgactggctgaagaaggagtcttttctgccgaatgagcatcaccaaaaactgatgaccaatgaagggggacttacaagatgactgatgtaaagaaatcaatccgcgccggccgcggcaccgaacttgaatgcttaggatgggagcaggaagccgtgctccgcatgctccgaaacaaccttgacccggaggttgccgaaaagccggaggatctgatcgtatacggcggcataggcaaggccgcacgaaactgggatgcttttcacgcgattgagcgttccctcaaaatgttaaaagatgatgaaacactgctgatccaatccggaaaacctgtcggattgttccgcacgcacagccgcgcgccccgcgtcctgctggctaattcggttctcgtgccgaaatgggcggattgggagcatttccatgaccttgagaaaaaagggctgatgatgtacgggcagatgacggccggcagctggatttatatcggctcacaaggtattttgcaaggcacctatgaaacctttgcggagcttgcgagacagcatttcggcggcagtctgaaaggaacccttacgctgacggccggacttggcggaatgggaggcgcccagccgctgtccgtcacaatgaatgatggcgtcgtcatcgccgttgaagcggatgaaacacggattgataaacgcattgaaacaaactattgcgaccgtaaaaccgcatcaattgacgaagcgctgcgctgggccgaagcagccagacaagccggagagcctttatcgatcggccttctcggcaatgcggctgaggtgcatcatgagcttttgaaccgcggcgtccatattgacatcgtgaccgatcagacttccgctcacgacccgctgatcggctatattccggcaggatactcacttgaagaggccgaccgcctgcgccgggatcagcctgaattatacgtaaggctttccaagcagagtatgaaaaagcatgtggaagccatgcttgccttcaagaaaaaaggtgccgtcgtctttgattacggcaacaatatccgccaggctgccaaagatgaggggctcgccgatgcttttgatttcccgggattcgttcccgcctacatccggcctttattttgtgaaggaaaagggccgttccgctgggctgcgctgtcgggagaccctgaagatatataccgcacggacgctttattaaaagagctgtttccagaaaatcaagcccttcaccgctggattgacatggcgcagaaaaaagtcacattccaaggcctgccgtcccgtatttgctggctcggctacggtgaacgggaaaagatggggctcgccatcaatgaattggtcagaaacggcgagctgaaagccccgatcgtcatcggcagagaccatttagactgcggatctgtcgcctctccgaatcgggaaacagaagcgatgaaagacggaagcgacgcggtcggcgattgggcggtgctgaacgcgctgatcaacacggcctcaggcgcaagctgggtttcttttcaccacggcgggggcgtcggcatggggtattcccttcacgcgggaatggtcgcggtcgctgacggcagcatccttgcggaacagcggctttcccgcgttctgacaagcgatccgggaatgggcatcatccgccatgcggacgcaggttatgaaaaagcggctcaagtcgccgaggaacaagacattatgataccgatgaaaaaggagcggtaacatgccgaaacaaatagataccatactcaccaacatcggccagctgctgacgatggaatccggcggcccccgatcaggcggaagcatgcaggatcttcatgtcacggaagatgccgtcatcggcattcacgacgggcgcattgtttttgccggacatcaaggagcggaggaaggatacgaggcaagagacatcatcgactgcgggggacggctcgtcacccccggcctcgtcgatccccatacccatcttgtattcggagggtcccgggaaaaagaactgaatttaaaaattcagggcatgtcctatttggatattctggcgcaaggcggcggtattttgtcaacggtcaaagacacgaaagccgcttccgaagaagaactgattgaaaaagggctttttcacctcggacgcatgctgtcatacggcattacgacggcagaagtaaaaagcgggtacggactcgacaaagacacggagctgaaacagctgaccgcggcgaagaaactgggcgaacgccagccggtcgaccttgtcacgacctttatgggggcacacgccattccgcctgagtaccggaacagccctgacgaatttctgaatcgcatgctgcagcttttgcctgaaataaaagaaaaaggcctcgcgcaatttgccgatatattcacagaaacaggcgtctttaccgtcagccagtcacgggactacctgaaaaaggcgtctgaagccggtttcggcctgaaaatccatgctgatgagattgacccgctcggcggcgcggaattggcggcagagctgcatgctgtttctgccgatcatttggtgggggcgtctgacgaaggcatcgaaaagctagcggcgtccggaacgatcgccgtcctgctgccgggcacgactttctatctcggcaaacacacttatgcgagagcccgggagatgattgatgcgggcgtacgggtcagtttggcgactgacttcaacccgggcagctcaccgacggaaaatctccagctcattatgtcgattgccgcgcttcatttaaaaatgaccgcggaagaaatctggcacgctgtcaccgttaatgccgcgtatgcgatcggaaaaggcgaagaggccggacaaattaaagccggacgggcggctgacattgtcatttgggaagcgccgaattacatgtatatcccgtatcattacggcgtcaatcatgtccgccgtgtcatcaagaatggaaagacggttgtctcaagggagggagccgctcttggataagtatccgtttctgcaaaaagccggctccctcttcaacgaccgccatgtgacaaggatcggcgatgtgacggaagcgtgggcgggacaaacgatcaaggggccggctttgatcggcgttccgctttctaagtcgtcaatcagccattccggcgcctgctttgcacccggtgcgatccgccgggcgctcggcgggatttccgcttattccgcggagctgcgggagcatgtcattgaccatctttacgatatcggtgatattcagattcacgtcacggatgtcgtcacatctcacgaacacatttatcggaccattcatgacattctgacggaccagcctgactgggtgcccgtcattctcggcggcgacaactccatcagttattccaccattaaagccattgcggaaacgaaaggaacaacggccgtctttcaattcgacgcccaccacgacgtccgcaacacagaagacggaggaccgacaaacggcacgccattccgccggctgttagatgaaaatatcataagcggacaaaatctgattcagcttggaatcagggagttcagcaacagcttggcatatgaacaatatgtaaaagaacgtcaggcagacgtgcatacaatggagatgatccgtgagaaagggctcctccgaacgatacaagaggtcttgccggccgttcaaaaaagagctgacgccatttttatttcggttgatatggatgtgctggatcaagctcatgcgcccggctgccccgcgatcggccccggaggcctgtataccgaagaactgcttcaggcggtccggtttttagccagtgaggctgacatctcgggtattgagatcgttgaggttgatccgacacttgattttcgcgatatgacaagccgggcagccgcacacgtcattttacatgcattaaagggatttaaattgtcacgttaaagtcaaatccggcacgcgtgctctcggctgccggaagattctcacgccacgcaaaaagggggagatcacgatggatgttgatcaaggcggcaatcagctaaagcgcacgatgaaaagcaggcacttatttatgatttcattgggaggggtcatcggcacggggctgtttttgagcacagggtatacattgagccaggccgggccgggcgggacgatcgccgcttacctgatcggcggcttgatgatgtatcttgtcatgcagtgtctcggagaattgtcagtagccatgcctgtgaccggttcatttcaaacgtatgcgacaacgtttatcgggccgtccacgggctttatggtcggtatcatgtattgggtgaattgggtggtgacggtaggatcggagtttacagcttccggtatccttatgcagcgctggtttccccacagcagcgtctggatgtggagcgcgattttcgcggctcttctttttgccgccaatgcattctccgttaaattgtttgcagaaacagagttttggttttccagcgtcaaaatcgttaccatccttttatttatcatcttaggcggcgccgcgatgttcggtttgatttcattgcacggttcgggtgaagctccgatgctgtcgaatttcacctcgcacggcggactgtttccgaacggctttcttgcggttttcattgcaatgatttccgtaagctttgccttttcagggacggagctgatcggaattacagcgggtgaaaccgccaatccggcaaaagatattccgcgttcgatccgaaatgtcgcctggagaacggtcatcttttttatcggcgccatttttgtgctgtccggactgatctcctggaaggaagctggtgtgattgaaagcccgtttgtcgcggtcttttcccaaatcggtatcccatacgccgcagatatcatgaacttcgtgattttaacggctttgctttcggtcgccaactccggactgtatgcttccacccggatgctgtggtctcttgcgaatgaaaacatgatcagcgcccggttcaaaaaagtcacaccaaaaggcattccgctgaatgctctgctcgccagcatggccgtttcctgcatatccttgatctcaagcatcgccgccccgggcacggtctacgtggtgctcgtggcaatagccggatttgccggcgtcgtggtgtggatgagcatcgccctgtctcagctgttatttcgaaaacattatgtgaaaaacggcggacgcgtctcggatctgaccttccgcacaccgttataccctctcgttccgatcgccgctgtgatcttatgtttcgcttcatgcgtaggccttgcatttgatcctaatcaaagaatcgccctcttctgcggaattccttgtatgatcctgtgctatctcattcgttttttgagaaagaaacagccgaaacaatccgtccgtgacattcatttggataaaaccatgccataaaaaaaggcacatactgatgaggtatgtgcctttcttctcttattccgtaatcagcgtatgaatcagtttcggcgcttccgctttttctgagatgcggatgttgtcatagactttggcggtcacgtcttcaacgttttcgcggttggcgtaaagggtgacgagcggttcgcctttttcgacgttgtcaccgacttttttgcggagcataatgccgacggcaagatcgatttcgtcctcttttgtcgcacgtcccgcgcccaacagcatcgctgcgacgccgatttcgtcagcgacgatttctgaaacgacacccgcttctttcgccggaacgtcaattttgtacgccgcctgcggaagtttggacggatcgtcaacgacagaagcgtctcctccctgattgctcaggaactctttgaacttttcaagcgctttgccgtttttcatgacttcctgaagctttgttctcgcttctttcaatgtctcagcttttttcgccaatacgaccatttggctgccgagcgtgaggacgagttcgtttaagtcttcaggcccttcccctcttaatgtatcaatggcttcttgtacttccagagcattcccgatcgcaaaaccgagcggctgcgacatgtcagaaatcacggccatcgtctggcggccgacgttgtttccgatgcggaccattgctttggcgaggttcacggcgtcttcatccgttttcataaacgcgccggctcccgttttgacgtcaagcacgatggcatctgctccggcggcgatttttttactcataattgagcttgcgatcagcgggatggagttcaccgtacccgttacatcacgcagcgcataaagctttttatcggcaggcgtcaagttgccgctttgtccgatgacggctaccttgtcgcggttcacaagcttgatgaattcatcttttgataattccacgtggaagccttcgatcgcttccagcttatcaatggttccccccgtatggccgagaccgcggccggacattttagcaacgggaacgccgagcgccgcgacgagcggtgcgagtacgagagttgtcgtgtcgccgaccccgcccgtagagtgcttgtcgaccttaatgccttcaatggcggagagatcaatcgtttcccctgaattcaccatcgccattgtcagatcggcgcgctcctgatctgtcatatcctgaaagtaaatcgccatagccagcgcgcttgcctgataatcagggatgcttccgtccgtgtatccttttacgaaaaattgaatttcttctgttgtcagttcttttccattttgtttttttacaataagatctaccattctcatgatctatcacctgtccttcatttatgttcagtgaatcaatccgacgatcgccgctgtcaggaagctgacgagcgttgcgccgtacagcagcttcagcccgaaccgcgcgacgacgtttccttgtttttcatgcagccctttcaccgcaccggtaatgattccgatagaggagaaattcgcgaatgagacaaggaatacagataccactgcctgtgtatgcgcactgaaatggaaatcgccggatgagagtgtctgcatcgccacaaattcattcgataccattttcgtcgccataatgcttccggcgctcaccgcttcattccacggaataccggttaaaaacgcaaacggcgcgaagacatatccgagcagcgcctggaatgtaatgccgaagaccgcattaaaaacgccgttgaccagagcaatgagtgcgacaaatccgatcagcatcgccgctacgacgacggcgactctgaatccatccattatatactcaccgagcacttcaaaaaaggattgcttttcttcttcaggaacgacgatcaaatcctcttctttgctgacggtgtacgggttgatgatagaagcgatgataaatccgccgaataagttcagcacaagcgccgtcacgacgtattcaggcttcagcatcatcatgtaagaaccgacgatcgacattgagaccgtcgacattgcggacgcacaaagcgtatataagcgctgttcagtaagataaccgagctgttttttcaaactgataaagacttctgattgccctaaaatcgcggatgcgacagcgttgtaagattcgattttccccattccgttcaccttgcttaacgcaagaccgatatacttcgtgatgaaggggaggaccttccaatgctgcagaattccgattaaagcggatataaagacgatcggcagaagcacgctcatgaagaacgtcgtctgtttcgcattcacaagcccgccgaatacaaagttaatcccttctgatgcatattccagcaagtagttaaatccttttgcaaaaccgccgacaagaaaattcccgataccggtgttgaggagaatataaccgagaatcagctgcagcacgagcatgacggcgatcggccggattctgattctttttttgccgttgctggcaagccaggcaagacctaaaaacacaatgattccgataattccgatgagatacttcatatgtgttctccttttatttgtattcgcttacaattttttatgcatcaacaaagaaagaggatggcggaagctttcggcttccgcactgctgattaatagtcgctgctgccgctgtctccgccgctcacgatagagacgcccgcacttgcgccgatccggctcgcgcccgcagcgatcatgctgtcaacatcagcttttgttctgatgccgcctgatgctttgaccccgatgtccggtccgactgtttttctcataagagcgatatcttcagccgttgccccgcctgtagaaaaaccggtagacgttttgacgaaatctgcgcctgcggataccgccaagcggcacgcgcgctctttttcttcatctgttaaaaggcatgtttcgatgatcactttgacgagcgcttttttatcagatgcttcaactaccgcgcggatatcagcttcaaccgcttcatcatcgccgtcttttaatgcaccgatattgatgaccatgtcaacctcagttgccccttttgagatggcatccttcgtttcaaatgcttttgtttccgatgtcgtggcgccgagaggaaatccgataacggtgcaaacgtcaactccagtgcctttcagttcctccgctgcgagtttgacccaagtcgggtttacacaaacggaagcgaatttatattcttttgcttcttttatcagttgtaaaatatccgctttttgtgtatgcggtttcaaagcagtatggtctatttgacttgcaattgacattgtatgcacttcctttttcctaggatacgtttagaataaccgaattttgaacatatgtaaattggtaattgaaattatgttcatgaattgtcacaattcttgaatgagttttttggccgtatgctgatcggtaatcaaaacgttggcgtactttcctttcagggcaccgtgaatggccttgcattttctgctgccgcccgccaccagaatcgaacgctctttcattttcaagtcgctgagctcgactccgatcgtcctgccgttaatgctgctgctgcaaatcctgccttcctcgtcaaaaaagcgcgaacaaatatcgccgactccgcgtgctttcagcaattgtttctcttcttcccggaaatagccgagtctgaaaagcagcgcctcatcccggacggttccgaccgtaaacagggcgatattggcttgtctgcccatttcaatgatccgcttaatatgtctgtcccgctcgaccatctgtttcacatcggcgctgtcaaatataaccggcagcggtaaatacctcggcatggtctgaaatgcttcggcgaacagctgaatcgtttctgacgagtacgtattaacattggaatgactgatgccgcctttcagctgcacgacttcaacgctctttacctgcttcggctccatgcggcttgcgatctggtacatcgtcgtcccccagcttacgccgagtatatcgccgtcctttacggttttatgcatatagtctgcgccatagcggcttaagtaatgtgtaatggcctggtaatcgtcgcttggagaaaagacgacgtgcgcctcaagcagcccgtatttttcttccagcttcgcgccgagttcgtccagatcctcaaacgggtccatgacgcgaatttgaacataccctttttcctttgcgtactgaagcagccttgaaacggtggggcgtgacagatcaagccgttcggcgatctgctgctggctgtaatctgattgataatatagttttgccgcttctatgctgagctgctgtttttcacgatccatgtcgcgcctcccctctccgcttatcatatcaccaaaacacgcggtaaaaaagcaccctctgatggggtgcctattttttcagcacaagctcctgaatcgcatgcgccacgccgtgttcgttatttgatttcgtttcaaaatcagctatctcccttacttccgggatggcattggccattgccacaccgcagccggcccactgaatcatggacatgtcgttgccgttatcgccgattgccatgacgtctttctgttcaatgccgagtttttcggccagcagcttgactgcgtttcctttactgactttcgggtgaagaatctcatggaagaatggcgcgcttttgaccattgtgtatgtttccttgaatgattccggaatggaagcgatcgctttctccagcttgtccggatcgtcaatgaacatgactttcggaatcagaatatccttcggcacttcatcgatcgtgcggaaatgaagcggcactttcgtaatgtatgattcgtataccgtgtattcactgatatcccggttcggcgtgtacagattggctgtgtcaaagtaatgcatcggagtatccagctgtaagctcagctcgtaaagcgacttcaaatcctcataacctaatgactgctcggccacgacaccgtttgtatacgtattttgtacgagtgcgccgttataggcaatcacaaagtcgccttcttcctgtaagttcagctcttccaaataccgacgcacgccgccgatcggccggcccgtgcacaggacgatattgaccccttccgctttggcggcatcaagcgccccgcggacttcagccgtcacttcatgatgatcgtttagtagtgttccgtccatatctattgcgattaacttgtacatcctgcatctcctttgtatccttttcttcttatgctttcatcatatcgctttttcgtttcaatgaaaaatcaaacggacgagtttctccgccttctcttcgtataccgggcctgcctccggatgcggggccgtcttttccccttgtcagcttgttcgccgccgtcatctgttttctgcttcaagagcatcagccccgccgcaaagaaagggacggccgctatgtccagaagggcaagctttattcccatcgctgcgggaaagtatgcccataatgaacggctgttccgcctgatcatgatataagaaacgatttccagcaggataaacagagcgttcacccacaagtaaatgagcattgccgcaaacagaaacagcaggagcgtattccgcagcgtgccggaaaacagaagagcgcgcatcatatcaaagaatgaaaaagactgcatgcttccgttgacgacattgggattgtaaatggtaaaacgcccgaactgatcaaaaagcataaaaaataaccataacagtgaaaaccattgaatgatatgtacgatgacacccgtcaaaacgagtctgtcggcagccttatttctcatgtgcatcctccccgccggtttttattcttgtcattgtttttgtttctccgtatatcttccaaatgagcgtaccgttttttcctcttttcaacgtgcttttgacggggtgcggatggccgaggtattcaatctcgatcgtcccgtccgtgttttgtgagatcaccttgtacacatctgagggcatggcaacctcgccgcggccttgaatgacctgctttgtcagcacgctgtctttcgtaaacgtgacggtttcagatctgaccccgtccatcgggcccggcttcagccctgcatcccatgtcccgtaataaaaaggggtatcgtctgctttcttttgcgagcagcctgttatcatgacgcatccgaaaacaagaaccgtcatgatgaaaatccgtatgttccgcaacatgatcaccttcctttgaagcttttttacgcctgtaacttaggcggatgccgtggcactgtgcaattgactacatagtgtataaagacttcactagataaggagaatgatgaatgaacccatatcagtactacaccccgcctgcctatttccctcagcagcaggaatacgaagtgaaccgcgttgagtatgagccgtatcagcagcaggaaagctattattatgcgccccctcagtccgaagagcggcagccgacaggtttagaacggagagtcgcccagcttgaaagacaaaacgccgagcaaacgagagagctcacccgcctctcacaagaagaccagcgccaaaaccgggaaatcacgcgtatgaatgagcagatcagacggctgagccagtccattgaaatccatacccgccgcttaaaccgtttgaatcagcgcctgcgcgcagtcgaaaacagactcaatattccttttcacgctacagaaggcggcttctgagaaaaagggccggaatacaaagctcgacaggccatcccgagccttgtattccgctctgtacataacaggtaaatatttgaatccttttcttacatgaatgcctctcctattctttcacatgataaatgtgtaaaatcaatcactccaggaggttttcatgatgtatcaaaaccaatacagcggaaatcagctgcagcaatgccgccaaacagcacagcagcttattcagcagacacagcaaagcagtcagcagtacaagcaaatgctccagcaggaacagcaaaacattcaaatgcttcagcagatgcttaaccatgaacagcatgccgttcataccattcagcaagcgctgcaggggcatgaagcggccattcagaaatgccagcaaatcgtgaatgtgtgcaatcagcttcagcaggaagtaagcggacacatgcctgcaccgatggcaaacgctaatgtttcttcattcccgcaaacacagcatcacacaccgtttcagcagcattcataccagcaataggccggtcatgcaaatgacaaagcgcgagataccggctttgtcatttgtttttatctctgttttgtcagatcaatgcgatgagcgggttttccgccgaattttgcttccgcctcatgccttaccgcttcaaacgctcttgcttcgacgttttgtttaaacacatcaagctgtatcaaataagccgcccgcactttcagcccgtggatgatggagatgacccataaaggcagcacgatatacacgcccggcgtgctcggcagcacaaaagcaattgctaaaataataaaatagataagtccgtatttcagccattttttgttcttagcccggtagccgatatagaaaaaggccaagaaagcggtcagcgcaaacggcgcaaaagtcagcagcagccaccagctgtgcagcacttcccaccaagtccctcttttcgtaatcaacattcattcctcctcctttactactataacatggataatcaaggaaggttttctataaaaaatatagacggaatgacgtcttcctgctatattaataatgataatcattatcacttaaatagggggatcattatgaagaaacaatcatggctgatcggcctggcacttctgcttgttttcgcattaagcgcttgcagcggcgcgaaggaaaacaacggatcggcatcaggcaaaggaaagacagacatgcgtacatatgaatcaacaaaaggaaatattgacatacccgcacatccgaaacggatcgtcactgacttttatgcgggtgagctgctgtccgttgacgcaaatgtcgtcggggcgggctcatggactttcaaaaatccgtttatcaaaaaacagctgaaaaacattactgacatcggcaatcccgtcaatgtggagaaagtgatgcagctgaagcctgatttaatcgtgctgatgaaggaagaccaatacgagaaactatcgaaaatcgcaccgacgattgtcattccttttaacaccgcaaagaatacgaaagatacggtcagcctattcggcgacattgccggggcgaaggataaagccaaaagctttatggcagacttcaacaaaaaagccgaagcgaatcaaaagcgcctcaaaaacgtgatcggcaaagacgagacagtcggcctttatgaaacgacggataaaggcgagatctgggttttcaatgacaattccggccgcggcggccaagccgtttataacgcgctcggattgaaagcgccggccaaaattgaaaaaaacatcatgaaaacaggcgccatgaaacaggtttcccaagaggtcatccctcaatatgcggctgattatatgttcattactgattacaatccgaatggagaaagcaaaacatttgagcgtctgaaagattcatccgtttggaaaaatctcgatgccgtaaaacacaatcgtgtctttatcaacgatttcaacaccttctatccgtatgacccgattgccgtcagcaaacagatggatatcatcaccgacatgctgatcaaacgggctgaagaaaataaaaaataaaaaaagcggcacagtcatgacactgtgccgtttttcctgttcactttaattttgactgtacggagcccggcatatcttcaaatctgacttcttcccaggtctcgacatactttcctttcgccttcaccttcaaatacgcgttcttccgaaggtctttcccggcgaaaaaggtcacttcttcttttttcccggatgcgttatatccgtctaatgtatactcagtaccgcccgggctaagatgtttgccatctcgatcaatctgtacataaacatcttgctggtgaataaacggattaaatctgtctgtaacatcattatgaaaaaagagaagtccgtatatgacggcagcggccgccaagacggccaggattgccaatgcttttttcatctttgcactccccttacttattcatttttttcaaatagcttgaccgcactgtgaggaagaacagaagctgaaaaatgaaaaaccctccgatagtgaaactgagcggccccgctacatcggaatagccttccacggccaatgttctcaaggcaaacagcgtatgcatgacggcaatgacaaatgggaagaagaacaaaatcgccaattgtatcgtcacgctttgtgccatttcacgctcactcaggccgattttggccaatgaacggtagcgctccctgtcttcatctaaatcggtgaacagcctgaaatataagaaacttgctgccgcgacaaagaagacgatcgcgataaacaggccgatgaataaactcaggctcggcagctgcaccgtatcatagtaggtgccggcttttgccataaaatcagaatggacgtcgatatagttgccgtaaatctcatttttcaaggattggctgatcccaagactgtctttccaatgatcatagctgtagccgtataatgacgctttctcaccgagtgatttcagctgatcaaaggtttgatcgttcaccgcgatgatggcattcaatgagatcagcggttttttgacttcttttaccgacagttttttgtcagacggcttgcctttttggttcagcagcttcagctgatccggcgcttcgtttttgaaattccggtcatacgtgcccgggaaatagacggcctcgccatgtttcaggccgtttagattaacatggaagtacttcgccgcctccgattcgctgatcatgtaaacagggggaacagtttctccttcctgatagcggacataggaaacatttattttgtctttcttatacgtaaagccgtgtgttttcagttcatggtcaatatctttcaaatgagtctgttcttttggattattgctgaaagatacatactccatctcataggcggactcttccgccccgacggtcgatttgtacatcgcgagcacgcctgtcgccgtaaacgctaccgcggaaataatgctgacgataaagaacaggcgggcgttgtcttttaaacgataaacaagatcagaaacccaaatgacatttttcccgcgcagataaaaggttttccacttcttcagcgcgcgcagaatccagatgctgctttggctgaaaaagaaatacgtaccgatgacggtaagcagtaaaatgatgaacggttgagtcccgtggacattgcctttcagaaccatgccgtacccgccgcacaggcaggcgatgccgaatatagacagaagcacggacggcttcggctccggcttgatcttgtcagtgccctttattaatttgatcaccgtatttgatctgacaaaaaggatcgtgaactgcgataaaaggaaaaataagagcagaaatccgccggccgtaatgccgagcgctttccaaggcatgtacagaggcagcgcgtccatttctaaaatataagcgccgaccgtaaagaacgttttcgaaaaaatgaagcctccgataatccccgctgcgatcgacatgacgccgatgatcatgttttccgccgtaatgagctttctcagctgcaccggcgtaataccctgcatcagcaggatgccgaattctttatttctcgatttcaaaaatgcgttaaccgaatacagaacaaataagaaagaaaaaacaaagatcatccattccgcagcggttaagccttttctggcgatgttattcaggtagccttcctttagtgccggatgaaacaggaacatcgcaaaggtaaagaaaatcaaaacggaaaaagcgctgcttaaaaagaaagcaagataggcccttttgtttctcgtgacgtttttataagcgaactgaagaaaggtcatttgcgtttccccccagcatagacagcacatcaagaatctgctcataaaagacttggcggttttccccgcggtaaatctcattaaacagttcgccgtcttttataaagatgacgcggcggcagtagcttgccgcaaccggatcatgggtcaccatcaaagccgtgatatgatcatcctgattcaggctctgcatcgtttccatgacgtcttttgacgctttggaatcaaggtttcccgtcggttcatcggccagaatgagtgacggcttatgaatgaccgctcttgcgatggcggcccgctggcgctgtccgccggatacttcaaacgtccgtttgttgagcaggtcttcaattccgagctttgccgcgatgcagtgcagtttttcttccatgacagacggcgcttctttttcaagcgttaacggcagcatgatattttcaccgattgtcagtgtgtccagaaggttgaaatcctgaaacacaaatccgagctgcttgcggcggaaatgagcgagctttgtccgcttcagccggtgcgggttttctccgtgaatcaggatatcgcctgaatccggccggtcgatcgttgaaatgatattcaaaagcgttgtttttccggagccggacggtcccatcaccgccgtgaacccgccttcttctattgaaaacgaaatttgttttaaagcttgataggacacttgtcctttataggttttatttatatgtttgacttcaagcatattcgccatgaaaatcctccttatggttttattcttgttggtctgggctgctttcatgtagtgccggggcatttaacataaaaatccccttgacataaatccatgttatcaaggggaaacaaaacgagctatgttgttttcttaacgcagccttacatttttgtaagaaatgaaaaccggaccgatgtcccttcaccggaggacgaagtgatgtccaccgtatgattaagcttgcccgtaatttctttgacgagatgaaggccgattcccgtagattcttggaaacgccgtccgttttcgccggtgtaataagggtcaaacacccgcttgatatcttgcgagggaatgccgacaccgtaatctttgacttcaagcaccgtcctgtcttcatcgcggaagacattcagctcaagtctgtcactcttgcctgccgaatacttgaccgcatttgtgaccacttggccgatcgcaaatttgagccatttcgcatcggtgtaaatctgatgatcatcgcgaatatccattttcggatagacgcggtattgaataaaaaatcgtttatagctttgaatgaccgattggagaagctctgataaggaaaccgcttcaactttaaaatcccgctcaaacaggtcaagccttgaagaataaagaagcgtctccagcccgaattcaatctgccggacctcttttttgatttgttcaaagacgggctcatcctcttcctgaatgattaaattaatgaccgacagcggcgtttttacttggtgcacccattggttcatatacgtcacccgcgcgtcaagcttggcttcggtctcatggagcttctggtgctgcatccgggtcagctccatctgcttttcatacagctctgaacaaaacactgaagaaccgagatacgggatgtccgtcccttcctgctccgagctgagccaatgatacacaccgcggtctttgtaccagcgataggcaagatatcccgccaaaataagaagctgcacgcccaatatgtaaaacaggtgggaaaaagaatgaagacccgcaaaccagtaataaaagaaaacaaacagcccttgaaggagaaaaagcagaatcagcacggcatgagaccggagaaacagcttcatgacagcgccctcagctggtagccttcgccccgcaccgattcaatggaaacaggcgcattcagctcccgcagtttttttctgagccgcgtgatatacacgttaagcgtattatcatcgacgaaaatgtcggtgtcccacgttttttccatgagccggtctcttcccgtcaccttttctccccgctccagcagcacttccaaaagcttgctttcttttttagaaagctcgcttttttcgtcctgaaagcgcagttcaaaccgttccacaaagagctgcacaccggcatattcaaccactttctctccctgcttggcggcgtactctccgtacgccctccggatctggcttttgattttcgccagcacaatatcgtaggaaaacggtttttcgatataatcatctccgccgttttcaatcgccatcacttgatccatttccccgcttctggctgagatgaaaatgatcgggcttgtagaatgctggcggatctggcggcaccaataatagccgtcataagacggcagattgatatcaagcagcaccacatcaggcttttcccgcaaaaaaacatcaagaacagccgtgaaatccgcagcggccacggtttgatatccgtatttttcaaggtaattctgcaatagtccgcgaatgtcttcactatcttccacaatcatgattttattcaaactgaaccactcccgtttcttacactgctgccatcatcataatcgtttcgggcgtacgggcgcaacaccgcacaaaaaaaccgccaccttggcggtttccgttctcatcagccgacctgctgttttacagctttaccggctgatccgaactctctcattttgcttcgcactgtctcttccacggcttcaatgccgggtgtcatgtagccgcgtggttcgtacagatctccgttttcctgaaacatgcggcgtgtttcgtctgtccaggcgaccatacattccgtgttgatattgattttcgcgtggccgagcgtgatggctcttttgatctgatcctgcggaatcccggatgctccgtggagaacgaggggaatatcagtcatgcgggagatagcctccatttctttaaatccgagattcggttcaccatgatatttgccgtggacggagccgagggcggcggccagcgcgtcgatattggtttctttgacgatccgctcacattcggcgacatcggcatagcggaccccgccgaccagcccgtcttccataccgccgaccgtgccgacttctgcttctactgaggcgccgtgcttagccgcataatcggcgacttcttttgtcatcgcgatgttctcatcaatcggatgatgggagccgtcaatcatcactgagctgaatccggcgtcaatggcctgtctgcagcgttccgcactgcttccgtgatcaagatggagcacgacgggaacggtaatcgccatttcttccattaacgcgccgaccatggcggaaatcgttttaaagccgcctaaatagtcgaccagacgatcggaagccgcggcgatgaccggcgattgctccttttgtgccgcttgcagaatcgcctttgtccattggaggccgttgatattaaattggccgactgcataatgctcccgtttcgcttctgcaagaagatgtttcatggtgacaaaagccatgttcacgcctccttcatgaagtattttgatacgacggcttccgttgtttcctttgccgttttgatcgtttcctccgcagtcagcttataatattcaggtctgaacagctctacggagacaacatcattgaatccgatttcttttaacgctgacagatgggcgtctaagtcaatcgcaccctgcccaggccagacgcggtcttcatccgttaaaaagccgatcggaaagtcttctgtatcgtcgatatgatagatgaaaattttctttccgtccgcctgcttcaaactctcaatattggagcccatcgcgtggaaatggaagctgtcaaacaccagtccgacattatcgcggccgacagcgttcacgatgtcatacgcctgttcaaatgtattgaccgtacattgcgggtggccgacaaattcaagggcaatgtttacgccgtacggctccgcgatgtccgaaagctcagtcagcacctctatgctgctctttttgatctcttctttcaagattttctgctctgtcacaagcggcacggccaccacatatttcacgccgagcgtcctgcaggtttccatcatgcttttgaattccgaaatgatctccctatagcccttctcatcacggttgttgaagaaaaccagtgcgttcagggcaagcggtttaatgtgatgggttcgaaaatattccgccagatcggccagtgaatggtcttttaagtattccggcagtttatccattgtgcggatttcaatataatcatagccgtgcttttcgcacagttctaaatcctgtttcaggtttgaattctccagcgtagtcgcttcattaaagcaaagtttcatgtcagcctctcccatccgcgttttcgatatgaagggagtccggctggagggcttttttgccccgctccgccgaactccatactcagcttatgccatacctaattcttcctttaatttcttaagcgtggtccggcttgattcatccgctctttcgccgacccaagcaaaaacggcgttcgtcgcaattccgtcgaatttcatctctctcatctttctgaaaatcgtttcaaaatcaacctcgccttgcccgatgtccaaatgctggtgaaccgttactttcgcgtcaggcgggttgacgatgtagcgcaggccatgcgccgctttatgattaaaagtatctgcaaataaaacatgtgtgaggcggtcgccggcttcatcaaacatggtcgcaatatcgccttttccgtcatcatagaagaacgtatgcgcagtcgagtagacaagattgatccaatccttgtcaagcgcgcggatcatatccatcgcccctttgtgcgtttcgataaaatcgtatggatgagcctgcagattgagtttaacgccttctttttcaaagacgggcagcagttcatccatggatttgataaatttttcttcacttgtcaacggatcatattttgaaccgctgaattcactgttcatcaaatccacttcaagttcaaccgcaatttcgatcgcccgtttccagttgcgcacggcggcctgacggcggtcttcatcaggacccgcccagtggtaaagcggaagaagagaggacagcttcacacctgtatcctttaaaaggcgcttcaattgtttgatttttgctgaatcgactttcggatatttgtagaaaggacaaaaatcctcgcgcggagacagttcgatatattcgtatccgagttccgccgttttatagaccatttcttctaacgttaaatcatcgcggtacatggatggatctaaggccagtttcatttctttcactcccgatctattatttgttcacagtcgtaaatgattggtagaatgccggtttctcttgcagcgccacaggctctttctgcccggattcctgagcttttacgcacgcgtcagttgtcaccgcggcaatataaccgtcccatgccgtcggaccgctgacttcgcctttattccggatcgaatcaatgaagtcttgaatttccacatcatacgcagccacaaatcggcgctgccaatccatcaggatatcggtgctgaatttcccttcttttctcaagctgatgcttgatggttccggaagcttgataacgccgtcttccccaacgatttcacattgaatgtcatagccgtatttacagttcacgtagatttcggcattgatgacgatgccgccttttgtttcgatgatgaccatctgcggatctttcagatgcggcagcgcattttttgatttcttcggatagatcacctgtacggattcatagtcgtcattgacgagccagtggaggacatcaatttcatgaacgagcgtatcgacgacggccatgtccgttgaataattcgatgcgactgtcgggttgcggtgcgcacagtgaatcatcagcggctcgccgaccacgcggttgtcaatcgcttctttcagctgaacgtaaccgctgtcatacctgcgcatgaaacctacctgcaccaatcgttttcccgtcttcatttcttcctcgacaatgcgcatacagccttctgccgttgtcgcaagcggcttttcacaaaacacgtgcttgccgtgctgaatcgctttcaaaacgctggactcgtgagccgggccccagcttgtcactaagacggcatccacattttcagcagcgaggaggctgtcgtcatcaggataaacggaggcgttcaaattgaaatcctgaacggtctgctgcgcggcctcctgattcacatctgtgacagcggtaatttccgcgccggacagcttatttgtgatgcggttgatgtgctcttttccgatagcaccggttccgataacacctatacgtaaattcattgatcgccactccttctgataatcaaataatggttctcgtctttcttttcccgctgccgtcctgaggagcaccgtacagttcctcctgtatttgttcaagcgacttgccggacgtattcggcgcgaagacaagcccgatgatcatactggccgtcacacatatgagcagaataccggccataaaaccgatgccgaattgtgacatgatgaccggcacaaataaactccaaattccgattgaaatacggacgagaaagaacatgagcccttgtgctgacgctctgtgttctgtcgggaacagctcgcttgcccacagctggtagttcgcctgctggccggctccgttattgatgccgatcgctaagacaaacaaaagcagcatcgggagcccctgaaacggcagtaaaaacagcgaccagccgacaacggccatacatgcgcagattccgaacaccgttttccgatatttatctgcaaaaggcatgaagatacaggcgacgccgagcccggtgaatataaacaggcccatctgaagaatgttggccgtatttgcggatacgccgccgacctgctggtagatgtacggcatgaagaatcccatgacgcccgctgcgagattccatacgagaaacacacccattaaaaacaaaatgttcttgaaaaatttcggctgaagcaggtcaaaataagatgtttttttcacggcggcaggccgctcttcactgtttttccaggcatccgactcaggtaaacgctttcttatcacatatgtgatcagggcaatcaccaatagatgcgcaaagacaattttatttcctaaaagcccgaggtcaccgaccaaaacggataacagcagaaccacaacggctcctgcggcccacgccacctgcgccactccgcaatgcctcgcccggtttttctcgggggcgttttccgcgataatggtccatgaagccgtaatatccgcgcctacagaaatcccgataatcatgtatccgcataacagcatgggaaagttaaatccaaacaaaaccaaacaaattcctaaggcgtagacgagcatactgtttgtgtatacagcttttcggccgaccttatcagcaaaatacccgccgagcagcgctccgatggccgctgatatcgcgtttgcgctgaaggcgccgagcaatccgatctggctgtcggacagcttcaaatagctgacccacatagataaacccgctgatcctgccacaatggaacccgcatcaatgtaatttgctaatgctgcggcgatggtccttttgctgaaagctgattccgccttggcactattcatataagtccccctctaatttgcaggatcaagcagttcactgtcgatgtactttctcgcaatcagcgcgtactcaagcggattggcgactgccgggtcttgttcggcttcgatgacgatccagcctgaataatcatgacggacgagcgttcggtatacttcggtaaaatcgatgcatccgtctccgggaaccgtaaaaatgccctgtaaaaacgactgcctgaatgacttgccttcctgtctgcaccgctccataatgtcaaaccgggcgtccttgaaatgaacgtgtctgatccgatccatatgcttgttgagaatcgtcatatagtctccgtccgagatataggcatggccggtatcataaagtaaatggacataccgcgggtccgttccatccatcagccggtcaacttcttccgccgtctggacgcctgtgccgagatgatgatgaaacgtgaggtccagcccgtattcgccagcgattttcccgagacggttcaagccttggcacagcgtatcccattcttcatctgaaaagtgcggtttttccttaaatacatcaatgtccaagccttgaacactgtacgtctgttcagaaacggtggcgacatccgctccgactttctgcaaataatcacagtgttctgtaaattgttcagccgttttttcaataccgtcttgtatgataaagctgctgaaccatttccccgcaatccgcaagttccggagagccagctccttattgaggacggagggttcagggaaaaaccctcccacttccgtaccttgaaagccggcgacaacaatatcgcttaacaaatgctgcagcgtattcccggctccgatttccggcatatcgtcattgcgccacccaatgggagcgatgccccacagaatatcttgtttgcccatcgtgatgcctcccctctagtactgctttgcagacttcagcttcgtctctttcgcttcgtatgcccgctgaacgctttcctgctccgacacttccgccacgccgacatgccaccagctgtcatagccgtccgtcatcgttttcggcagaaccttcatttcaattaaagtggatacgtcttgcgttttcgcatcttcaagcgccgctttcagttcttcaaccgtattggctctgtatgttttagcgccgtagccctctgccaccttcgcgtaatcaacgtttaaaatctgattgtcctctgtgcggaactcgcaaaaataactgccgctcccgtgatccatctgcagattgttgatacagccgaatccggagttgtcaaaaagcaggacattgatttttttgttatattgaagcgcggtaatcagctctgagtgcagcatcagaaagcttccgtcgccgacgagtgaatagacttctttgtcgggatgggccagcttgaggccgagcgtgcctgatacttcataccccatgcaggaatagccgtactcgaggtggtacgtattcgggacgttggaatgccacagccgctgcaaatcccccggaagagatcccgccgaactgatgacgacgctgtcttcaggaatcgtgtcattgatggtcaacagcgccgttgtctgcggcagctcagtctcgagcgcgtcggcatactcgtttaacacgtcctgtgaaaaatggttcttaatttccggttcaaacgcgtcacgtgtaaaagtgaccttgccgagccggtcccgttcagcaagccattcatctttccagtctttaatcgccgtgccgaatgcacttttatatccgtctaataagccgtgcagcctgccgagcgtcactttcgcatcggctacaacctgaaacgcgtcaagcttgtaagcctgcatgcggctgacgttgatattcaaaaattttgctttgtcaaaatcaaacgccgttttcgaggatgtcgcaaagtccgtgtaccgtgtgccgacaccgatgatcagatcagcctggcgggcggctttgtttgcggcgagggtgcccgtgatgcccatgccgcccagattgttggcgaaatcggcttcaaccgttgacttgccggcctgcgtttcgacaagcggaatgccgtatgtttcagaaagcgcgattaattcctcacgcgcgccggagtacttcgcgccgccgcccactaaaatgacgggacggcagctctccttaattctttccgcggcgcctttcagttcacgctcgctcggctgcatccgatcaatgtaatgaactcgtttttcaaagaagctttcatcaaaatcaaatgcttctccctctacatcctgagaaatacagatggtcgccggacccgcttttgccggatctgtcatcacttcaaatgcccggattaagctgctcatcagctgctcgggtcgggtaatgcggtcccaatagcgggacacgggctttaacgcatcgtttgtcgtgacggcggcactgtattcctgctccacctgctgaagcaccgggtcaggctgcctcgtcgcaaaggtatcggccggaagcagcagcaccgggatattattggccagcgccgtacccgcggcagccgtcaagttagcggcacccggaccgaccgatgtcgataccgcgtaaatttttcttctcagcatctgcttgctgtatgccatcgcggcatgcgccatgccttgttcgtttttgccttgatagactttcaggtgcccggcgtcctgctcaagcgcctgcccgatccccaacacatttccgtgaccgaaaatcgtgaagatgccctcaacgaacggctcttcttttccgtcaacatgaatgtactgccggttcaagaattgaatcagcgcttgtgctgtcgttaagcgaattgtcttacccacaaacgatcccaccttttatacgttctatttaccgttaagactgtgctgcgcttcaatcagttcgatgatttcaccggcagccggcattgcttctgaggagctgtgtttgctgacgacgatggaagcggaagcgctcccgtattttaaagccgtttcaatatcccggccgctgacaagtccgtagatgaaggctgacgcataggaatcacccgctccgaaggtcttcagcacctttgttttataggcatgcgcccggaaaacttctcccgatctgctgtatgcgtatgatccgtcaacgccgtgcttaatgacgacaagatcggcggaatgcgcaaacaaatggcggacggtttcatcgttatctccgccgctgcggttttccattacgtcaaattcatcacgcgtaccgatgacgatatcggattgttccgccaccagcgtgtagtacacggctgtttcttctgccgattgccatgtatacggacggtagtcgagctcaaacacgacttttacgtcatgtttttttgcgatatgcaccgcttttaagacggcttcgcgcgacgggcttttcgcaagcgccgtacctgatacgagcagcattttcgcgtttgcgatgtagccttcattgacttcggacggctcaagatacaaatccgccacgtcatcccggtacatcagaatgctgcactcttccggactgagaatttccgtaaaagcgagcccggctttgcgcccttctctgtcaacggtcatttgtgacgtatcaacgccctttccctgcatataagaaacgatgaatctgccgtgctgatcgtccgggattttgccgataaaaccggcttttaatccgagcttggcgctgccgatcgcaatatttgccggggaaccgccgacatatttagaaaacgtcatcgtttcttccatcggccggttgtattccgccgcgttcaaatcaatacacgcgcgtccgatcgcgacaatatcaaactctttttcttcattaaacgtatatttcatcgttatctgccactcctcacttgttagcgttccaggatccattcatgggccggatcattatgaaacttccattttcgtgtcggtcccgccattacattcaggtagtaagaggtatacccgtccggaacaccaaccgggtgatagcccgccggtacgatgacaacgttttcattttctgcggtcatcgtctcgtcaatcgagcggtcgtccgtgtacacacgctggaagacaaacccctgcggcgggtccgtttcatggtaataggtttcttctaaaaaggattcagccggcagattgtcttggtcatgtttatgaggcgggtagctcgaccagttgccgctgtccgtgtaaacttcaacaacgagaaggctgtttgccgatggatctgaatcggggagaatattatgaacggttcgtttgtttgccagcttgccgcgatgttccacaccgttgtcttccgctttaatcagctttgtcggaagctggtgttcggacggagaatagcacagcgcgaccctcgccccgctgaccgctgtgatttcaaaagagcggtcattggacacataaacgctatccgtcggttttctttcaaatacgctttcacgggtgccgatgctttcaaatgtctgatcataatcagtgacggtgatttttcccgttaccgcaacgatgcagcactccgtctttttcaaatcctctgtatatgtggaaccgggagtgaggtcaacgactttaaatccgacgtatttgaggtctgaattggctgaagtgacgtcatgtatgatgttcacgccttgagaaatctcatcggcctgcggtttgcgcagcaaatgactcatgtttattcctccttaatggatggtaaaagaaaacccggacggaatcacaaagccgtccgggccggctgtcagatcaattgaagtcaggagacgggtatcgtgccgtcacaacttttttacgtgtatagaagtcgacgctgtcttttccgtttgcgtgcaatgtgccgaagaaagaagacttccagccagagaacgggaagaatgccatcggcgccgggacgccaaggttgatgccgagcattcccgcgtcaatattctcacggaagtagcggatcgcgttcgcatttgaagtgaacagacacgcgccgttcgcaaattcagactggttggcgatgtccaccgcttcttttaagtttttcacgcggatgaccgacagaacgggcgcaaagatttcatctttccagatcgtcatatccgtcgtcacgttgtcaaaaatcgtcggtccgacgaaatagccgtcttccgttgcgttttcacgcccgtcacaaagaagtctcgctccttcttcgatgcctttttcaatatagctgtgcgtgcgttttttgttgtcctcgcggatgaccgggcctaagaacacgccgtcatccagtccgtttccgatcttgatgtccgctgctttttcctgtaatttcgaaataaactcatcggcgattccttcttcaaccgtcacaaccgcgcatgccatgcagcgctctcctgccgaaccgaatgccgcgccgataatgtttgcgaccgtatcttcaaggtgggcgtcattcagcacgatcgtatggtttttcgcgcccgttaacgcctgcacgcgtttcaaatgttcgctgccttttttgaaaacatactcgccgacaggttttgaaccgacgaatgagatggctttaatatccggatgttcaagaacgccgtttacgacgtcatgcgcgccgtgcacgacattgaagacgcccttcggcagaccggcctgttcaaacagctctgccagtttttccgttaacagcggcgtgcgctcagatggcttcagaatgaacgtatttcctaacgaaattgccatcgggaacatccagcacgggaccatcatcgggaagttgaacggtgcgataccgccgaccaccccgatcggatagcggtagttcgccgcctctacatccgtcgcgatggaggcgagtgaatcgcccatcatgagtgacggcgcgcccgctgcgaattcgacgttttcaattccgcgtcccacttcaccgagtgcttccgtcgtgtttttaccgttttccaaagtgatcagacgggcaagctcttctttgttctgctggagaagctgctgatagttaaatagaattcttgcacggcgcggcactgccgtctttgaccatgtttgaaacgcctctgacgctgagcggacggcgtattccacatcctcccgcgtagaaatcggaacctggcacatcacttcttttgtagccggattgacaacgtcttcatattgatctgtcttactttcaacccattcaccattgatgtagtttttcagttttctgatctctgccattctcattgcctccttaaatagtaaacatcctgttcagctggataataacggatgaatatattcatcttttacatataaaagacatgaattaaacgcttacaaatgctaaaatgatggtgactcccaatctttccatgtaaaagttggtcatgtgccggaaaaagcaaacggttacatctttcaattttgattttacaggttatattttggtcatttcttggttacattgtaatcccaacacaccttcaagtcaatctaaaaaatcaaaattttttcattatttttaccatactttttttgagcgggaaaacaggaacttggagaaccgtgtcgaatcgtacggcgtgaaccctcttttttatcatttgttaagtaactattgattaactcttggtgtttattatatattttaattactttaagaattctagaaggagtttttttatgaaactgatgcggattcaggagatggaagaatacattctcaaacacggagccacttcgctggatgagctgtgcgaggtattcaatgtctctaaaaacacggtcagacgcgatattaataagcttgcggaaaaaggggttatcaaaaaggtgtacggcggcgtgacatcagccgaaaaatctgtgctcgtcccttttgagaaccgcaccattcaacatcaggacgaaaaaatcaaaatcgcccgctatgcgtcacggtttatcgaggatcacgatcttgtatttattgattccggcacgacgaccaaatcgatgctggagacgcttgatcccgataagaatgtaacggttttgacgaacagccttgatattattaacgccgcttcatccatgaaaaatatcgacctgatcatcatcggcaataactacaagcggaagacaaggtcgtttgtcggcattgatgatccgagcacactcaataaatacaacattaacaaggcgttcatgtccgctaccgggacaacgatcacccacggcctgacgaattccgacttactggaatacgaggtgaaaaagaaaatttccgaaaaggcgaacgaagtgtatctgctcgcggatcattccaaattcggcaaatccacgcttttgacatacgcgcctttcgaccggcttcacagcattgtcacttctcagcagctcgatgaggaatatacgaagtattgccaagagcatcaaatcgacattcacttggcatagcgttatagttaatagagaacgctgccgtatttttccggcagccgctatgatatccaattttttcagggggcgaaaacatgagcaaagtaacaatcggcaaaactgacctaaaggtatttccgatcggtttgggaacaaatgcggtcggcggacacaatctctacccgaatctgaatgaagagacgggaaaagaattggtccgggaagcgattaaaagcggcgttaccatgttagataccgcctatatttacggtgtgggccgttctgaagaattaatcggcgaggtgctgaaagaatgcaaccgcgaggatgtcttcatcgccacaaaagccgctcacagaaaagaaggcgatgactttgttttcgacaattcaccggcctttttgaaacaatcggtcgaagacagcctgaaacgcctgcagactgattacatcgatttattctacatccatttcccggatgagcacacgccgaaggacgaagccgttcaagcgttgaatgagctgaaaaaagaaggaaaaatccgttccatcggcgtatccaatttctctttggaacagctgaaagaagccaataaagacggcttagtcgacgtgattcaaggagaatacaatctgctgaaccgtgaggcggaaaagactttcttcccttatacgacagaacacggcatctcattcattccgtacttcccgctcgtatccggactgctggccggcaaatacgacgagaacaccaccttccctgaaggcgacctgcgcaatgaccaggcgcatttccaaggggagcagtttaaagaaaacatcaaaaaagtcaaccagctcaaaccgattgccgaaaagcacaatgccgatacggcgcatatcgtgcttgcctggtacttggcgagacctgaaatcgatatcctgattccgggcgccaaacgcgcggatcaattaaaagacaacatgaaagcagcctccattacgctatctgctgaagaaatcgcgtttatcgacaagctgttttcctaagaaaaaaaaacacgccttttaaaaggggcgtgttttttttatgtttatatttttctcttcggggaatgaaatagttatctaaataaactattatgcgttccaaaagatgaggaggatcatctgtgaagaaaaacaccaaaaaatacctgatttactttttcggagcattaggcgggctgctttacggctatgacaccggtgtgatttcaggggctttgttatttattaacaatgatattcctttaaacacgctgaccgagggattggtcgtcagcatgctgctgctcggtgcgattttcgggtccgcattaagcgggacatgctctgaccgatggggccggagaaaagtggttttcgtcctttcactcatttttattatcggcgcgcttgcctgtgcggcttcgcaaaccgtcaccatgctgattatctcccgtgtcattctcgggttagccgtcgggggctcaacggcgctggttcccgtttatctatctgagatggcgccgacaaaaatacgcggaacgctcggcacattgaataacttaatgattgtaaccggaattttactcgcatatattgtgaattacatattcaccccatttgaagcttggcgctggatggtcggtctcgccgcagtaccggcggcgcttttattaatcggaatcgcgtttatgccggaatctccgagatggctcgtcaaacgcggccgtgagcaggaagccagacaagtcatggaaatgacccacgacaaagaggatatcgccgttgaattggcggaaatgaaacaaggagaagccgagaaaaaagaatctacgctcggcttgctgaaagccaaatggatccgccctatgctgctgatcgggatcggcctcgccatcttccagcaggcggtcggtatcaacacggtgatttactatgcgccgaccatctttacaaaggccggactcggcacttcggcgtccgttctcggcacgatgggcatcggtgtcttaaacgtcatcatgtgtatcaccgccatgatcttaatcgaccggatcggccggaaaaaactgctgatgtggggaagcgtcggcattaccttgagcctggcgtcactatcagccattctccttctggccggcctgtcagcttcaacagcatggctgaccgtgctgtttctcggcatctatatcgtcttctaccaggcgacatggggtcccgtcgtatgggttctgatgccggagctgttcccgtcaaacgcacgcggagccgcaaccggatttacgacattgattctgtcggcaaccaacctgatcgtttcactggtattcccgcttatgctgagcgccatgggcatcggctgggtattcggaatattctcagtcatttgcctctcatccttcttcttcgccgcttacatcgttcctgaaacgaagggcagaagtttagaagaaatcgaaacgcacttgaaaaaacggttctccttaaagaagcgcagcaaacaaaatcaaattcttaaacagcgcacactgtaataaaaaaaggaatcgcccccgctgggcgattcctttttggcgtcataccataactttgcaaatgtcattcgtaaattcgaccggatcatggatcggcagcccttcaatcagaagcgcctgattgtagagaagatttgtgtataatgcaagcttttcccgatcttgtccgtgcgcgttctttaacgtctcaaacacttcgtgattcgggttgatttccagcactttttccgctttgacctgctggctgtcaggcatagcattcaacactttttccatttcgatcgtcacttcgccgtctgtcgcaaaacagaccggatgagattttaaacgtttcgacgctctgacgttctttactttatccgcaagaatctctttcatgctttcgaacaggtctttatattcgttctcttcggcttcagtctgcttttcatcctcatcactgtcgatgcctaagtcggcgcttgatacggatttgaactctttttcctcatagcttgtcagcattttgatcgcaaattcatcaatatcttccgtgaaatataaaatttcgtagcctttgtccgccaccatttcagtttgcggcagcttttcaatccgctcatatgaatcgccggacgcgtaatagatatatttttgatcctcaggcattctggacacatattcgtccagagtgacgagctttttctccttagatgaatagaagagaagcagatcttttaatacgtctttattcgcgccgaaatcattatagacgccgaatttcagctgtctgccgaaagattcatagaaagattcgtatttttctcttttgttcttcagcaggctcttcagctcggctttgatttttttattgatgtttttcgcaatcagcttcagctggcggtcgtgctgcagcatctctctggaaatgttcagcgacagatcctcagaatccaccatgccttttacaaagctgaaatggtccggaagcaggtcggcgcatttgttcatgatcagcacgccgttggaatacagctccaatcctttttcgaattccttcgtataatagtcaaacggcatgttttccggaataaacaaaatcgaattgtagcgcaccgctccatcgacgctgatatgcacatgggtcagcggtttatcaaagccgtaatgcttctcggcgtaaaaagcctcgtaatcctcatctgtcagctcgcttttgttttttctccagatcggcaccatgctgttgaccgtctgttcttcctgaacttcttcaaattcgttctcgctgccctctttcggcttgttgaccgtctcttccattttgatcgggtagcggataaaatcagagtactttttcacgatcgctttgatgcggtagttttctaaaaactcatcatagctttcatcttccgtgttttcttttatttgtagggtgatttccgtaccgacggtttccttgtcacacggcgcgatcgtgtagccggcggccccttccgactcccatacatacgcctcgtcactgccgagcgccttacttttcaccgtgactttatcagccaccataaacgccgcataaaatccgacgccgaactggccgataatgtcatggccgtctttcgagtcattttcttgcttgaaagcgagtgaaccgcttttcgcaattgtgccgagatgctgttcaagctcgtcttttgtcatcccgataccggtgtctgtgacggtgagcgttctcgcttctttgtccgccgtcacttttatgtagtaattgtcttgatcaaacgttaatgaatcatcggttaacgccttgtaatagattttgtcaatcgcatcgctcgcgttggaaattaactcgcggagaaaaatttccttctgcgtgtaaatggagttaatcatcatgtccagcaatcgcttggattctgctttaaacttttttttccgcacttcagatctctcctttaattatgctttgatgttatgtaaaatcttttcagcatctatttatcatatacagtgacaattgtcaactaggattagcagatgcatatattgtaaatttaacatgttaatggattcatttcacccattttatcaataaaaaagagagaatgttgatcatcctctcctctctgcttctttccggcggccgaattccttcttcatccatatgtatgacggatagaaaaacaaactaaataagataagagatcccaagtttcgcaaagactcatgaagaacatttcttacagtgagaggaaatgtgatgtcctgaaatagaatagagataacggtgtaaatcacaaatcccataggaacaatggcataacaataaaacgctatctccttcttatgctgtatctccaaaatatgtaaacctcccaatgatgtatatacataatattaacatatttaataggtatttagaaacagacctccgtatgtttatccccctattcagcgggaacagatataaaaaaaggaggaatcgcaatatgggaagattaacagacaaaaccgcaatcatcacaggggccgcgacaggcatcggacaagcgacggcacgggttttcgccgatgaaggcgcccgcgtgatctgcggtgacatcaatgaaagcgaactgaatgaaaccgtcagcgctatcagaaaaaacggcggagaagcagaagcctttcaccttgatgtatcagacgaagaaaacgtaaagtcttttgcggatggcattcagcaaaagtacggaacaattgatattctgtttaacaatgctggtgttgaccaagagggcggaaaagtccatgaatacccggtcgacctgtttgaccggatcatcgccgtcgatctgcgcggcacatttctttgcagcaaatacctgattccgctcatgctcgaaaaaggaggctccatcatcaacacctcctccatgtccggccgggccgcagaccttgaccgctcaggctataacgccgcaaaaggcggaatcacgaacctgacgagagcgatggccattgattacgccagaagcggaatccgcgtcaattccttatcgccggggacgattgaaacgccgctcattgataaattggcaggcacgacagaagacgaaatgggcgaagcgttccgtgaagccaacaaatggatcacgccgctcggccggctcggaaaaccggaagaaatggcagccgtcgcgctcttcctcgcttcagacgacagttcttacgtcacgggagaagacatcaccgcagacggcggcatcatggcatacacttggccgggaaaaatgctgattgataagaagtggaaggaagagacggagtgacggcgaaaaagaaacaagccagtgcaaaaacactggctgaacaagctgagggcgggttacttaaaccagcccttttcctttgatcgggtaatggcttcaattcgatttttcacttctaatttatccaggatcatcgaaacgtaattgcggactgtgccgcttttgatgctgagggcgtttgcgatttctttcgtgtttttcccgtctgcgacaagctcgagcacctctttttcccgttcggtcagcgggttttcttcactatagatgtcctccattaattcaggtgcgtagacgcgtcttcctttcatgacgctgcggatggcgctgacgagctcatcgctcgggctgtccttgagcatgtacccgctgacgcctgcttttagcgcccgctgaaaatagccggagcgggcaaaggtcgtcaaaatgatgattttcacaccgctgtccttgagttcttctgccgcttcaagacctgatttcccgggcatttcgatatccatcagacagatgtcgggcgcatgtttttccacgaaatcgatggcatcctggccgcttgtgcctttaccgacaaccgtcatatcctcttctaaattcaacagcgaaccgagtgcgccgagcagcatttgctgatcctcggcaatgaagatgttgatcatctgctaccatccttttcttttgattttgaatcattcgggattctcatggtcagctttgttccggcggctgtatcgatggctaaactgccgtttgcgaattcaagacgttccctcattccaagcaggccgtgcccctttgaaaaaaagcggtcttctttgcattgaaagctgccgtcatcttctaccgtaatgacaacctctttccaaagctgctgaatggtgatgcggcatactttggcgccgctgtgtttcacgacattggtgacggcttctttaatgcacatgctgacgatgttttcgttcagcaaagagatatgtttgggcgcttctttttcttcatacacaaaatcaattcctgccgcttcaagaatttgccgaacattgccgagctcatccttcaatcggatgcctttcatcgacgagacaatttgtctgacctcatttaaggaggtgcgggccgtctgctgcacgcttttcagctcagtgcgggcctgttcagggtccttgtatatcagctttcgggcgaggtcgcttttcaatccgattaaggagagcttttgtccaagtgtatcgtgaaggtcccgggcaatgcgctgcctttcttccagcttcacaagatcggcgattcgctcatttgcatattctaatttctcctcaaggcgctcccgtgcctttctgcttcgaatgctgagcgggagcaggatggcactgatcagagtgatgacgataaacggaatttgtgtcaaaaaccacccttttttcagaacaaggctgaagttgacggcaaccgccgcactgatgatatgaatgtaatataagatgtaaaaaggaactttgtctcggatatggccgatgaagtaggcgataaagaaggcgaagtaaatatagctgaacagcataactgagccggtcgaaatgccgatcagaagaagcgcccataagtaaagcggccagccttttgcaacaaatgcgaagcggtatgcgccaaagaaaacaagtgtgaaaatgatgccggccacgatgacaaaggtagaagagcttttaaaaataaaataaaaaggcaagatgaaaaaaatcatccatatataaggagaaatcccgttcagtttttgaaatttaaaatatttcttcatccttattccaccttctgctgcttgtgtctaccatcactttatcaaaacaccgccttcattgcatcctcacgcatgaagagaaggccctttctgataagagaaagagccgcgcgccatatcaggcatttttcttcaaaggttctttcggcaccggatggggcgccggttttttccgcgcctcccgaaaggtgacaaattgcttttcgtcctcatcccacagacggaatttcatggattcaagacttgttttaagcgtaatggtcggcacgttttttaaaggctcgtgcccctcatgagcggcttccagcttgtagttcggcactttcgggcttaagtggtgaacatgatggtagccgatattgcctgtcagccattgcaaaagcttcggaagcttgtaaaaggagcttccttctaccgcggcctgcacataatcccaatgctcatcggcttcaaaataagaatcctcaaacgtgtgctgaacataaaagagccagacgccgattgaccccgaaataaggaaaatcggaccctgaacaagcaaaaagttttcccagccgacaagcaggcacgtcgcagcagccaataagacaatcgccgcgttcgtgaaataggtgttccagcgctccttgcggcgggcgccttttacattgaaacggtttttaatcagaaatacgtaaatcgggccgagaataaacataataaacggattgcgataaagtctgtagcgtacttttgtccaagctgacgcttcgttgtattccttgacggtcatcatccaaatatcgccggtgccccgtttatctaagttgctgctcgtcgcatgatgaatggagtggctgcgctgccattgaaggaacggaaacagtgtcagtacacctgaaataaacccgaacagccggttcagcttcttttgtttgaaaaaggattgatggcagcagtcgtggaaaataataaagattcttgtcaaaaatcccgctgctataacagtaaaagcgagggtcagaagataggagacattgaggctgaagtaagcaagaaaccaaagggcaaaaaacggcacaaacgtgttgaaaagctgattgacactatgctttgtatcggcaccggaaaatgcggcaacctgcttttttaaagatgcttgtttttgagttgcggtgtgattggtcatgaatgtcatgtcccttctttttcattatgatcccaagtataacggggcgccagacgcttttgtagtagcagccatcatgccccgaatatgacatttgtcatgtttggcggcagaatgctgatcaggcgtcatatggaaggtatcttttttataagggataaagccggacacttcatatcggcgcttctcaaagaaaacagcaaaaaagaacccggcctgttttcggctgagttctttttcatcatcctcacagcaaaatcacccgatacttcttcacatccaaaaactgcagaaactcccgggccagcatgtccggcgcgtggtcttttccttcatgaagacgatattgaatcaaaccgacgagcatggacgcgacataatatgcatagagttttttgcccgcctgaatgtgcaggggctgatgaagataaaacgattgcagcgctctgaacatttccgggatgacgtcaggcactcccgaaccctctctcagaaaatgaacgagcggcaggccgtccgacagtgccgaaaagagaccgacgagcgcggattccgcttcttccatggagcaatcggcaggctctccttttaccgtcaataatccgatcagatcccggcatgattgatggatgatcgttttcagcaatgcttctttgttggcgtaatggtcataaaaagtggcacggcggaggttgctttgacgggcaatatcggaaatcgtgattgccgcgtactcttttttttccgccattaagccgatcatggcttcttgcaaggcctgcctcgtccttgtcacccggcggtcggcgggctttttttcttcttgttccggcacccggcggccgaacagccagtaaaaccgtttttgagaaatcaaatcccacacctgtccgctgatcgcttccggggatgccccgggctcctcattcagccagtacaacacaatggcatacgtgtataaagcgcggtaatgaatgtacatatcctgttcagtcggtgagaaatccgcattgaccggtgacagcagcacatcatgccggaacacatcttttaaaaaagcatgaaagtgaaaatagggcattttattgcgatccatcatcgtttgaaaaaacacccgatgccgatcaacaaaagacagggtcggatgcactttttgccatccgccatgtaaatgaagcacatctttattcttcagcgaatcatacagcgcttcgctcagcccgtctttcatttcttcctctatatcctctaaaatcgcatatttatcttcgtaataaaggtacagtgtcccccggctcacacgcgcccgttcggcgatgtccttcatggtcacacggcggatatcccgctctccaagcatggccaaaagcgcttgtttgatgtcagttgtcacagaatccggcataagagacactcctttcattagacagatcaccgcaatttgtacggtaacgtatagatgagtttacgctgtctttgccgcaaaaacacatcacattataataggccctgaagaaacaaaaaagcaaccagaggaggaagaccgatggatcagcatataaaagcagacatcaaacgcgtctttgagcttcagaaaaaaaatcaaaaaacgctgcgtgcttcaacagccgggcagcgcagagaaaagcttcagcgcttcttggatgccgtcaccgcacatgaagaagaaatcatcgaggcgatcagacgggacgtccgcaagccttatcatgaggtgaaaagagcggaaacgcagggaacgattaaggcgattaaagataatatgaacaatctcgacacctggatggcgccgaaacgcgtcggctcatccgtcagtcccgacgctgacggcgtattaatgtacgagccaaaaggccttaccttaattctcggcccgtggaattatccgtttatgctgacgatggctccgcttgcagctgccattgcggccggcaacagcgcgattgtgaagctgtccgattttacaatggagacgagccatatcgccgcgacagttattcgcgaggcatttcacgaagaagaagtcgccatttttgaaggtgaggtcgatgtcgccacagaactgctcgaccagccgtttgaccacattttcttcaccggaagcacgaatgtcggtaaaatcgtcatgacggcagcggcgaagcacttgtcgtccgtcacgcttgagcttggcggaaaaagcccgacgatcatcgacagcgactatgatttaatggacgcggcgaaaaaaatcgccgtcggcaaatttgtcaatgcggggcaaacatgtatcgcacctgactatctccttatgaagaaagaagtgcagaacacctttacagatctcctgcaaaccattgtcaatgcaggttttatggaggatgatcatacggttgaccgcaacaaattcacgcagattgtcaacgaccgcaactttaaccgtgtcaaagccctgtatgatgacgccattgaaaaaggggcgaagacggcgttcggcggcgtattcgatgcgcatgaccgcacgatttctccgaccgtgctgacaaacgtcacgcctgatatgaagatcatgcaggaagaaatcttcgcaccgattctgccgattatgaattacgaagatatcagtgaagccgttgattacatcactgaacgggacaagccgcttgccttgtatgtattcagccataatcaggagcagatcgattatgtgctgcagcatacgacgtccggcaatgcttctgtcaatgatgtcgtcgttcatttcactgacgtcaaccttccgttcggcggtgtcaatacgagcgggatcggttcatatcacggtgtgtacggctttaaagaattctctcatgaaaaaggcgtatttattcaagcctctaaataaaaaaagaatccgcgcagatgacgcggattctttttaattatttttttgccccgaatgcgagcagtttcgtataagtaccgacatagagcgtgccgtcttcagccagaaccggggaggaaatgacattgctgtctgtttgatagcgccatttttcattaccgtcagcgtcaaccgcatagacatttttatcgtcagaaccgaagtacacattgccgtccgcatcaatcagcggcgccgttctcacaggcccgtccgtatagaaagaccagttcatattaccggttttgctgatggaaaacagctcgccgcttccggaaccgatatacacattgccgttatggtcgatcgctaatgaagagctggagaaaccgtttaacgggaacgtccactttacagcacccgttgatgtataggcgtataagttgccgtcctggtttccggcgtaaacggtgccgtctctatcaataaccggatagcctttaaacccgttggacgtcgtttttgaccatttcacttggcccgttccggaattgatcgcgtaaaagatattattgtacgttgccgtatacagcgttccgtttgatgctaacacgggagcggaaccgaccacgccgtttgttttaaacttccacttttgcgtccatgtcgaaggcgacgtcggtttaatcgcatagatatagttatccagcgtcgacacatacagcgtgccgtcagagccgatagccgcatcggaactaggcgctccgctcagcggaaccgatgttaaaatgtttccggtttctttgtcgatgaaatatagttttttatcgtgagaaggaagataaatgacaccgtttgttccgagcaccggagtcagcgtataggtcgtcccgaggttttccgtcacccatttcacagtaccgtccggatgatacgccgtcagcttcccgtcttttgattgaataaatacggtgccgtccctgtcaaccgcggctcccgcaccgttttgaggattggccggaacattcttttcccattttaacgcgccatcggcagtgcttgtaaaccggctttctcttgaccagttgaacatcgtcggagacatcgcctgcgcgtcataccgtcccgccaagaaaccggatgccacatgattttgtttaaataccgtttccgcagcttgagcagccgccggatgcagccattttgcccccggcagatcagaaaccgctcccacagataaagccgcagcaaccgcagcgccggccgccaatgttttcattcgcaatgaagctgtcttttttttcaatgtcagttcctcccgtttctattaaaagctgctatatcacttcgatcataccataattaacctatgaaatatttgtattttcggtagatttatagaacaaatgtcacatagcctgctgatgcttcggggatgatcgaaacgcggcaatataccataccacattgacgataaaagccgcgcctgaccaaacgagaaggccgtaataaagagacagctcctgccctaaggaaattgcggtcaataacgccaccaacaagacagccgcgcaaatgataagcccgattccgcaaaaaacggccatgatgattttcatgacacgaataccgagaatatatataatgagcgggaccgcatatataacaaagatctggccgacggcggcccacatgcccgcggaattaaaacgattcgcgttcggccccgtttccgcaagcggagaaagcgagacgaggaccggcaataaacaaaacagcagagcggaaagcaaggtcaccgcaaccgcaccttttttcttttgattcatgtgaatatcctcctgacaataacccggcttttttaccggtaatctgataatatgttatattttagcacgatttttacttaatttgagaatgttttgtcaaaaacgaatttacaaatctagaaaaatagatataataaacgttatggaaccgatattgattcataaagcgttatccaacaaaacacgaagtgatattatgacatggcttaaacacccggaggaccattttgatgaaaggccttatcttgagcagggcctcagtttccgcaccggaatttgcgtcggtgatattcaggcaaagtcggggcttgcgcagtccgtcatctccagctacctgctgaccatgcaaaaagccggcctgctggaatctgaacgaatcgggaagtggacctattacagaaggaatgaaaaacaaattaaagcctttgctgactatgttcagcaccagctataaccatgaaaggagggctttttttgttctaacatatctatttttctgtatatgtagttataaaaggaggtatacataacaatgaaaaaaagcagttccatcttcattctatttttggccctaggggttttcgggattattacgaccgagatgggcatcatcggggttcttccgcaagtggcggacagatttcaaattaccgcttcaaaagcggggtggcttgtcagtattttcgcattcatcgtcgctgtgtcggggccgtttttgaccttgcttgcttcaggcataaaccggaaagtcattctgcttttggcggtgctgatgtttgccgtttcaaatgcggtctacgcgtatacggcgcatttcagtgtcatgctggcgtttcggatcattccggctttatgccacccggtgttcttttctgtagcgcttgcggccgcggcccggcttgtccccgccggccaatccggaaaagccgtaacgaaagtcttttcaggcatcaccgccggctttgcgttcggcgtgcctttcacgtcttatctggcggatcgtctatcccttgaagccgccttcttattcggcgctatcatcagtctcatcgcattcacgggcattcttctctttttgccatccatgccggtcacagaaaaaatgtctttcagaagtcagctcggcatccttcgcaaaccggctttgtggctcaatatcgctgccgtcacctgtctctttgcggccatgttttctgtctacagctattttgcggagtacctcggacgggtgtcccatatgaacggcacatgggtcagctttatgctgatgagcttcggagtgattatgatagccggtaatttcgtcttcggcgctttgttatacaaaaatatgaaaaagaccgtcatcctgtttccgcttctttatacagccgcctacttgctcatatacgggtttgggacgtctttcgcgccgatggccgtccttgtcttcgtatggggcgccgttcattccggcggtctcattgtcagccagacatggcttactgcggaagcaaaggaggcgcccgaattcggcaacagcctgtttgtctctttttccaacctcggcatcaccatcggaacggcggcgggcggctggtttatttcacacttgggaatccatcagctgatgtggtgcggcatcatgtttgcccttctggctttcgggctgatcatgggacgcttggcattgggaaagaggctgctcgcagaagcttaagctccgttgcaaaatccggaatgattacgtataatattccagattaaagcaagggagagaaaaagatacatggaaagaccggcaggattttggattcggtttctggcttacgtcattgatcaaatcatcataggaattccgatttttatcattcaatttatggtctcttttttatttgcggcaggcgttgcggcggctgaccccttcatgaccgaaaatcagtttaacatctcttttctggtgttcggcgtcatcccgattcttgcgagctcttttgtgatcagtatcttatatttcagcctgctcacggcctcaaagatgcaggggacactgggaaaagcattgctcggccttaaggtcgtcaatgaggatggcggacggatttccatcggccaggccttcggacgcgctttcgcatatatcatatctaagctcattctttatatcggtttcatcatgggcgccttcggagagaaaaaaacgctgcacgacatcatgtgcagcacccgtgttgtctataaataacgacctcaagtccgggccttttgagcccgggcttttttatgacggctgtgcccgcctgatgtcaatgccgccctttccgtcagcctcaatgcggatcgtcccgttcacaatgacagacagcggatggaactccgcatgctgatcagaaaaaatccagcggcggccgctcggccctaaaagcaaaaacgccccatcattgtaatcacccataaaatgaaacccgttttccctaagaggcgcatgctttctcaccggaatgccgaaacgctgcagctttctcccggttgatacgacttcggcagccgtcagattcacctcgccgatattcagaacggactcaatcgaaaaatgttccgcgcttggcggcgatgtttctctcgcgatgaattccgccagattgttggacggatctttgaaataaaaggaacgcgcctgaatatgagagaaatacacctcatcctccccatcttccgtttgaaaaacaactttatccttcatccacgccttcgcctcatcaaaacgattattcggaatgttaaacgcgaaatgatacgtcggatgagagtgagaatcggcgcgcctgaatttcaactcactttctcccgccttgatggtaaacgaatcaccggactcatcaattaaaggaaaacctaacacccgttcatagaagtgtttcgtctcctccaacgcacaactgtacaaagtaatgttatttatttgcatgatcataccccctttggtttatactgccatatagaagggttgattcctactgtttcgattcaccaattgagaatccccctttcgcccggcgctaaacatgacaaacagcgccaaaccgcttataccaggcgattttaaacgtctaaagcaaaaaaagcagaaaataataccccatatagcttgacaaaaaataaatgttatttaataatctatatataattagaattattattgaaagataaagtgaatgctttgtctttttaatatatttcaaatcacatttcaggaggaagatattatgtctttaatcggaaaagaagtactgccattcgaagcaaaagctttcaaaaacggtgaattcatcgatgtaacaaacgaagatttgaaaggtcaatggagcgttttctgcttctatccagcggatttctctttcgtttgcccgactgaacttgaagatcttcaaggacaatacgctgcactgaaagaattaggtgttgaagtatactctgtttctacagatactcacttcgtacacaaaggctggcatgacagctctgaaaaaatcggcaaaatcacttatgcaatgatcggtgacccatctcaaacgatctcccgcaacttcgacgttcttgacgaagaaactggtcttgctgaccgcggaacattcatcatcgatcctgatggcgtgatccaaacagttgaaatcaatgcaggcggtatcggccgtgacgcaagcaaccttgtaaacaaagtaaaagcagctcaatatgttcgtcaaaacccaggtgaagtctgcccggctaaatgggaagaaggcggcgaaacacttacacctagccttgatttggtaggtaaaatctaaggagtgcattccattggtacttgatgcaaatatcaaagcacaattaaatcaatacatgcagctaattgagaacgacattgttctcaaagtaagcgccggtgacgatgacacttctaaggacatgctggctctcgttgacgagctggcttccatgtcatctaaaatttcagttgaaaaaactgaattaaacagaacaccgagcttcagcgttaatcgtaccggagaagacacaggcgttacattcgccggtgttcctctcggccacgaatttacatcattagtgctggcattgcttcaagtcagcggcagagcgcctaaggctgatcaaaaggtcattgaccagattaagaacatcagcggagaataccgctttgagtcttatatcagcctgacgtgccacaactgccctgatgtcgtccaagcattaaacatgatgagcgtgctcaacccgaatatcactcatacaatgattgacggcgcggcattcaaagaagaagtggaaagcaaaaacattatggctgttccgactgtattcttaaacggtgaatctttcggaagcggccgtatgaccatcgaagagattctcgcaaaaatgggcagcggcgcagatgcgtctgagtttgccgacaaagagccgtttgacgttcttgttgtcggcggcggacctgccggcgcaagcgcggcgatctacacggcgcgtaaaggcatccgcaccggtgtcgtcgctgaacgcttcggcggccaggtactcgacaccatgagcatcgaaaacttcatcagcgtcaaagcgactgaaggaccgaagctcgctgcaagccttgaagagcacgtgaaagattatgatattgacgtcatgaaccttcagcgcgcgaaacgccttgagaaaaaagacctcttcgaacttgaacttgaaaacggcgctgtactgaaaagtaaaacagtgatcctttcaacaggtgcccgctggcgcaatgtcaacgtacctggtgagcaagagttcaaaaacaaaggtgtcgcttactgcccgcactgtgacggaccattgtttgaaggcaaagacgtagccgttatcggcggcggaaactccggaatcgaagcggcgattgaccttgcaggtatcgtcaatcacgtgactgtgctggaattcgcgcctgaactgaaagcagacgaagtcctgcaaaaacgtctttacagcctgccaaacgtcactgtgcacaaaaatgcacaaacgaaagaaatcacaggcgaccaaaacgtaaacggtattacgttcgttgaccgtgaaacaggcgaagaaaaacacgttgaactccaaggtgtattcgtccaaatcggcctcgtgcctaatacagaatggttagacgaaacggtcgaacgcaaccgcatcggcgaaatcatcgtcgataagagcggcgcgacaagcgttcccggcctatttgccgcaggggactgcacagacggcccgtacaaccaaatcattatctccatgggatcaggtgcaactgccgctttaggcgcatttgattatttgatccggaattaatgtgaaagccgccatatgaatggcggcttttttaaatatactaattaagaaggcagtatttcctctaaacaatcctcgctgattttataagattttggccttctgcttaccagctcaacaaatccttgctgttctaaataatccattactctgttaattttatgtctcgatttatttgagagctccattaaatcttgcaccgacagcgtaacctgatcatttacaaatacattaatcgtgataatgatattaaaaatatcacgttcatctttataatcagcccattgatcgctatcaatatagttcctaattcgtttcagtttcattaaattaaattcaagatcctcaataattcctttttgtcctgacagaagcaattccagcatatccattaaataaaaagtcagctctccccggtttaaaggtgcgggaatttcctctaatgccttataatacttatctttgttcttattaactgcgtaagaaaaagtgatggctgaatatttttctaagtatcgggacaaataactcccaacgataaggcgtcctgttcttccattgccgtcataaaaaggatgaatgtattcatagtagtaatgagctgtcatgtaacgatacagctggggatgtgtttcatcatgaagataagcaattaaagcctcaagcgcttctgttatcttctgttcagaattaacgccgatatgggtggtcatgttcccatcgttcacttcaacatagccttttctgaatagctcaccatccggcgcatcttctgttccgatttcatctgcgaccagctcgtcatataattccctaaagtcatgaatgcttgtaaacgacggaattcggtctataaattgatatgttttcatcaatccgacaaaccgcttatgtgagggctcggattgttctaacgctttaagagcctctttcaattctttttttgtactgcggattccttcaatttcattattactctgtgcttcattaataattaatttatcaaaataaggtttgacagcaaattcagggagctgactgataagggatgaaattttggaactgtttaacaacacttcattattcagcttcatgagtttatgtgtattcacataaaatagctcaaatgaatcttccgtgggtcggccttttcggaacccccgtatgtttaatgatgttgaataactgccatagctgcttgttctctttttaaattctttctcatatgaatcagcatccattttataaaaaagcttagataacttctcatacttcatattatcacctcgcttaatttaaaattacacactttttttaaattatacaatcattatagcctgatttctaacaaatattctcgctttccaatcaaaacaaaaaacggcatactgcatggcagtacaccgtctgaagcaattcaatctgtctttctccctctcgcccgatagataagaaataatacaataaaccacagcggcgtcagcagcaaagccgggcgcgttgcatccgcaaacagcataatcaccagaatgacggcaaacagcgtcagcacggcgtaattgataaacggcgcaaacggcgccttgaaagacgagcttgcatgtaagtccggacgggttttcctgtatctgatatgacagaccagaatcacgccccacacccaaatgaaacaaatcgcgctgatggtggtcacgatgccaaaggccgcttccggtatcaatttgcttaaaagagcgccagctgacagcacaataaccgatatccataatgcgcggctcggcacatgatttttattcagcttcgcaaaacttgcaggcgcttgtttcgttttgcttaagttatacaaaatccggcttgttgaaaacatcccgctgttacaagcagaagcggcagacgttaatacgacaaaattaatgattcccgcggctaacggaatgccgaccagactgaaggtctttacaaaaggactttccgccgcattcagctgcatccacggattaatacataaaagaatgagcaatgccccgacgtagaaaaataaaatccgcaatggaattttattgatagcggacggaatattttttttcgggtttgacgtttccgccgccgacacacccactaattccacaccgacataggcgaagatcaccatctggaacgaaagcaaaaagcctgaaaatccgttcggaaacaagccgccgtgctcccacagattcgccgctgagaccgttccggtatgcgttttgaacccaatcaccagcagaaccacaccgatgacaattaacgcgagaatcgtgactaccttaattaaggcgaaccaaaactccaattctccaaaaatcttaaccgttaacagattaagccctaataaaatgagcaaacagataagtgccggaatccactgcggaatatcaaaccaatatttcacatacacaccgacggcgatcacatccgccatagccgtcataatccagcaaaaccagtaggtccagccggtgacaaacgctgcacgcggccctaaatacgcctcggcaatatccgttaatgattggtagcccgctttagataacagcagttctcccagcgcccgcatgacgaaaaaaagcgcaatacctacaataaaatacgcaaagatgatagaaggacccgccagctgaatcgccttaccagaccctaaaaacaatccggtgccgatcgtgccgccaatggcgatcagctgcacgtgccgattcgataagtccctctttagctctcgctgctccacatctgactcctccttacctctctagtgaacgacgagcaaaaaaagccaataaaaaaagagattggatgccctccaatctcatggtcataagaatatcaaattatatctgcgccgctgacaatcaacagcatgacaaatacatattcggtactcttctgtccttttgcctgagattgtgaacccttcggcgccgcggaaaacccgcggtctctccagaagccgctcctgctgtagttcgacccacagcaatcatagcctgctacgtattgagtttctgatagaaatacctatcagctaactttttattttaatggaacttgaatgcattgtcaatagagggatgagctgcacggcgttatcccggtccaatttttgatgcctgaagcgccgtattttccgttttcattgtctcaaaaaggcgttatgcggtactatcatataaggtctaatcatttaaacattatgtcatactttaaattcactttatcatacaattgctcgtaaataaaaaggggatggacgagattggaaacgaaatatttagatctgctcgcacaaaaatacgattgtgaagaaaaagtggtcacggaaatcattaatctgaaagcgatactgaacctgccgaaaggaaccgagcatttcgtcagtgatctgcacggggagtatcaggcattccagcacgtgctgcggaacggttcaggaagggtaaaagagaagatccgcgatattttcagcggcgtcatttacgatagagaaattgatgaactgacggctttagtctattatcctgaggacaaactgcagctgatcaaacatgactttgatacgaaagaggcattaaacgagtggtataaagaaacgattcaccggatgattaagctcgtttcttattgttcttccaagtacacccgctccaaattgcgcaaagcgctgcccgcccaatttgcttatatttctgaagagctgctgtacaaaacagaacaagccgccaacaaggaacaatactactccgaaatcatagaacagatcattgcgctcggccaggccgataagctgatcaccggccttgcctacagcacgcagcgtttggtggtcgaccatctgcatgttgtcggcgatatttacgaccgcggaccgcagccggataagatcatggaagaactgatcaactatcattcagtggatattcaatgggggaatcatgatgttctctggataggcgcttattccggctcaaaagtatgcctggcaaacattatccgcatctgtgcccgctatgacaatctggatattattgaagacgtttacggcatcaatctgagaccgctattgaaccttgctgaaaaatattacgatgataacccgtctttccgcccgaaagcggacgaaaacagaccggaagatgagattaaacaaatcacaaaaattcatcaggcgattgcgatgatccaatttaagcttgagagcccgattattaagagacggccgaactttaatatggaggaacggctgttactggaaaagatcgattatgaccgcaatgaaatcacgctgaacggaaaaacatatcaactggaaaacacctgctttgcgacggtgaatcccaaacagcctgacgagctgttagaggaagaagcagaagtcatggacaagctgctgttctctgttcagaactccgaaaaactgggccgccatatgaattttatgatgaaaaaaggcagcctttatttaaaatataacggcaacctgctgattcacggctgtattcccgtcgatgaaaacggcagcatggaaacgatgatgatagaggataaagcttatgcgggccgtgagctgctagatgtttttgaacggttcttacgggaagcgtttgcccatccggaagaaaccgatgatctggcgacagatatgacttggtacttatggacaggcgaatactcctccctctttggaaaacgcgccatgacaacctttgagcggtatttcattaaagagaaggaaacgcataaagaaaagaaaaacccgtattactatttgcgtgaagacgaggcagcctgccgaaacatcctgaaggaattcggcctcaacccggatcacggccatatcatcaacggccatacaccggtaaaagaaatcgaaggcgaagatccgatcaaggcaaacggaaaaatgatcgtcatcgacggcggcttctccaaagcctaccaatccacaacaggcatcgccggctacacgcttttatacaactcctacggcatgcagctcgtcgcccataaacactttaactccaaggccgaagtgctgagcaccggaaccgacgtcttaacagtgaaacgattagtcgacaaagagctggagcggaagaaagtgaaagaaacaaacgtcggtgaagaactgatgaaagaagtggcgattttggagaaactgcgggagtatcggtatatgaagtgaagaatatggagttcagggatgattctctgggctctttttttacggtttccctgtatgtaaaatcgatttaaccgcttcttcaatctccctataacccgtacatctgcaaatattggactccagccaattttttatcgtgtcatcacttgcattcggctcagtattcactaaagcatgacaattcatgagaaaacccggtgtgcaataaccgcattgaaacgcgaatttttcaataaaagccttttgaatcggcgtattgatcagtccttcaattgtcgtaatgtcctttccttccccttctgccgcaagcattaagcaagatttcatcggcaccccgtccgttaataccgtacaggcgccgcaatccccatttaagcagcccggctttgcaccagttaatccgagacgaagacgaagagcaaataacaaagtatcagccggcctgaccgtaatctgtctttcctcgccatttactttcaacgtaataggatcagacatttggacctccttctaattcccgtaaggcatctaaaattgtattttgcaagacaaatattcggtattcacttgagccttctgcgtcatcaagaacgggtttgggtacatactgtaaagacctgcgcactctttcttctgctgatcggtttttatcgttaagcacagcctccatttcagcagaacgaaacggaaatggacatacgccgctgaaggccattctgatctcatcatcttttttcagcgcacagactgtcaccaatggatacccgacattccactgctgtcttcttttgatactgacaaatggcaggtcaacgtacgctcgatcgacaacgacatgaaataaaaaatcacctttttgcaactgtatttccttgttaaatactttatttatgggacggtaatgaatccccgctctccctgcaatccctatcaaactatcagaaatcagcaacggcagcacggcctcacggtaatagatgcccccgcaaatgtttccgcccaggctgatcttatttcgagtcgtccgatcggctatttcactgactgttttacttaatagcggaaatggattttcttcctccagtttcgttaatgacacgcccgctccgatcaccaaatcattttcataaaagcggatggtttgaaattccggaagcgcgttcagatctatcaccgcatccgtatagatgatattcagccttcctaacgtgataatttccgtgccgccggaataatacattggtgttttcttttcggccgcaagcgagtgaaatagattgattgtttcttgaatggtcttcggtttaaaatagtcgaaatcaaacggtatcatctttccacccctcttgcgtcctccataatcgttcgggaatgagaggaagttgattcaattggacacctaaagcggcggaaaggcaatttcccaatgctgccggcatccccaacagtccgtgttccccgcctccgcgcgctccataaggcgcaatcacatgcggggtttcaacaaattcaatgatatattcaggctgctctccatagtgaagggggcggtatgttctaagctgaggatttaatactcttccatatgaatcaaatacaaaggtttctcttcctccaaatgcgattcccatgctcatcccccccatcacttgacccctagcagctttttcattcagtacagttcctatatccacaacagaataggcttttgtaattcgatacgtataatcccgtttatccaactcaacttcaattccctgagcaccgacagcccactcgggtcccggctttcctcttcccgtttcccggtctaaattcgtcatccgggttaatgtgtaattgccgctcgcaatgatttggccgccaatggtatttccatttggaaacgtatatccgtaagcaatgtcttttatttcaacatgtacagaaggatgatctataaaataaacctttccgtcggccacttccaattcctcgacaggaacccgcaacacacatgatgccacgtctttcagctttcgaatggcttctttcgctgcattcagtacggctcttccggccattaacgtccctctgctccccacggttttccaatgctcgggtgttgtttgtgtatctataagcattttcacgtgaattttgcttatatccattttcattcgttccgctaagatttgggctagcactgtttttgtccctgttccaatttccactacccctgacatcaaattaatgcttccatcgggattaaaggttagaatcaccccggacgttgcatttgtatcaaatgttgaggttttccaaatgcagctgattcccttcgcccgtatcttccggccatcgatttcaattcgctgtccctcgtcccaattcattaattcctttaatctttcaatgcatttcggcacatttccgaccgtgcttgaattgagaagaacttgagtcggtgtggtgtcaccggggcgaatggcatttttatagcggagttctaatgggtccatgttcagcttttccgccaatacatccatcgtccgctcaaaggcaaataacacttcagcatggctgtagcccctgaatgcacttggatatggatgattcgtatacatacaatatgaatcacaccgtatatgatcgatcgcgtacggacccgtacaatcaaccaccgcagcccggctgatgtccactcctttatcagaatacgctccgccatcaaataaaagctgaatgtccgccgcctttaagattccatcctttgtagcccctaatttgacaatggcatccaacccgatatgaacgggagatgtgatcatatcctcttctctcgtattaaacaatttgacgggccggcctccaaccgcttttgatgccaaataggcaatcacctctaactgaacggctgcttttcccccgtacgctcctcctactaaaggtgttttgacgatcacctttccgggttcgattccaaaataccactgcattaattttttaatggcaaaaggggcttgagaggatgtggtaatgataatctcctcatccgctcgaatttcagcgatcgagcatcttgtctccatcgcagcgtgatcagaagggttaaaggaaatctggaattctgctgtcacatcactttccctaaacccgtcttcaatatttccttttctaaccttatccaggtttgcgatattggtcttcggaaccgggaatacaccttttgtcttctcatagcggtccgcatgttcatgaacgagtggcgcatccttttgaaaggcctcacggggggaattgacgacgggaagagatttataggatactttgatggcatccgcggcctttttagctgtaatcggattttccgcaacaacaacagcaaccggctcaccatggtatctgacccttttataagcaatcggcgatctgtctttgatttcctcacctgcaagcggaaaaggttcatcacccaatatcgctctcacgccgggaatcttccaagcttctgaaaagtccatcgacacaatatcggcatgagcatatggactggtcagcatttttgcatgcaacgtccctgtttcttgaaaatcatccgtatatttcgctttacccgtcactttttcaaaggcctctttccgaatgacactcttcccgatatactccaactcattcactccccgaatttattcagcagcagcgtataatcttcaactgtatcgacgtcataaaaaagcaaagggtcttgaaagctgatcatttttcccgtattgatcatactttcacggatgacatgccgggcgccctgatctccctttaattgatgcaataccggaaaacattgatttgagaataaaatggggggcataggaagacgttgattttcagcggcgataaatgaataacggcgctccttttgataggaatcaattaacgtattgatgatatctgcggtgacaaacggctgatctgcaaggagaatgataacggcgtcagcctcgtactctgccgctttttgtaaaccgcattgtatagaatggccttggcccttacccgcttgctcacattctgcctggctccacttatttgacataggggataaaaagaaaaaatccgaaagccaatgcagtggatctctctttcccgttataacgaaaatatgatctaattcagataacaaggcatttttaagagccatacttccgagggagactccattgagaaataaactgcgcttatccgtccccatgcgtctgcttgtaccggctgccaggtaaatggctgctgttttcataaggcagacctttgctttcgcatttctttaatcatctcgccaacaatacttacagcaatctcttcagggccctgtgccccgatgggaagtccgataggggaatgaatatcctccggaatctcagctccgcctaatagccgttcagtgcgccttttagggcctaatacacctttataaaacacattctcgttttttaatgtatgtaaaatgatctgatctttttgaaagctgtgtgtcataatgacaacaaaatctctttttgtcatgctcaggccttccatgacttcttccggtgcccctgttatcaaatggccggcttcaggaaaatggccgtgatgacataaagcgggacgccagtcaatcaccgtcacatgaaagccagtgccagctgccaacgaaactaacggcttcgcatcttcccctgctccgaagacatataaacaaggttttggcaccatctgatggataaaaaataaatcagaggtatgttcatccctcttgattcccttttccgtctgtctcagtttttgaatacggccttgttccataacatccccggttccaaacacgctgccgtcttccactatgtacagatcttccttcagctctaacgttttagtgaatcgtttcattcgggtcacagactttttttcatctaagcatgtcttgactgtcatcagatgtctttccaattctccttttacaggctcaagtaaaaccgtcaaaacaccattacagccaacgccttgtccccaggataaatcgtcctccgcgctcatatcaaagcggacaatcaacggctctcctgcagtccagacctgttccgaccgttcaacgagatcttcttccagacaaccggcggataacattccgactcttgttttgtcccctaaaatcagcatggaggccccttccttcttataagcggacccctctgttttaatgatggtagccagtaccttagcttttttagaagtggcgatgacatccaaaatccggtgtatatcatccatttcatgtcccccgcttttacctgatcatatctgcatctgtatatccgtattctttttttccagaaaacattacaaacgcttcagcaatttcttcgtttctaaaagaaaagagtctttatagaccttatgaccgggcggcgggtgcgacagcatgttggagcggagagattccaataacatgatctgttccttctgtttccaattgtctgtttcaccctgttgtatgcctttaaagcctgcaaagtattcacttaacacttgtaaatcattccccagctcccttttgtcacttgaagataaagctccttctttttcccattcttttaacgttttcactatatttgatagatactcaaatccggcgttcaacttttgcatctctatttgatagcttgaaatgatgattttatgtttttttctgacggggttgaattttaagctgtcagaggctgtttgcagcatctcttttgccgtatgcagctcctgcagaagattgttcattctatacgccatgaggtttccttttccttgtccccactctgattgcacccatttggaaaggtctgaaagtgtgccagaaagctgacgagccaatgtttgaaaagagtccgctgccttttttgtgtagtccggcggaaaaaggaacatgtgaaccagaatggcgatgatgacgccgatcaccgtatcgatgattcggtcgaatgcataatctttagcgtttcgttcaaacgtaaagaccaacaaaatggtgagcgctacctgatgtaaaaccgttacatctattcgtaaccacttcgcaatgtaggttccgcctaataggaacagccccagtatccagccattcattggcaagtgactgacaagataggacgttagcatgatcccaatcgcagttcccgcaatacgatgaaaagaaaagcgaattgactgatctatcgttggctgcaaacataaaataacagaaagaggcgctaaataggggtgatcagagcccgccagttttgccgcttcccaagaaacagcagatgcaatcgccatcttccaaaccaaagatgttttgttttgaatttttttacttttcatcatacgccccctcctttcagaaaccttttccactaggtttccgtgacgcaaagggatttatactgtcgtatgaaaaaagcgaaaagaagctgttgttcagaggggaattcttaaatgatggcttctttttgggggttggggaaagagtactaaaaggcctggtttctgccctccttgataacttcgcatcagatatgaactttactctcctatgactttcgaagggaaacatacaaaccgtgttggttaatgtgatgaaattgggtgaattttttatcattttatatggtaagggtttaagatgcagattgcctttgttagtatggcaaccaaaggaggaggatcaattatgcaaagcagaatgaagctaaccgcagtgaaactggcagccttggtattcctagtaggtgcctttgccctcccggttttaccccatgctgcggctgccgcagaatcccaagctacatacaaagttgaaaacctcaacgacagtgagctgaagatgacgttcaatcacgcagatattcatattgacgctaaaggcaatgcaaccctaaaagacaacataacgggcgaggagcaggctcttccgaaaagctctactgacaaaaatggtgaccccgttacactgaaatatgaagaaatcaaaaatggcgttttagtcaaagtagtgaacaaagacgctggaaaaacgagtgggtcaatcagcactcaatcagttggaaaatgtattttaggtactggaggcggtgcggtaactggcggcggcacactgggtcttgcaggagctgctgtaggaacagttacaatacccggcatcggaacagtaggagcgggtgccgttggagcaattaccggcgctgttggcggcgcaatgacaggagctgccgcatcttgcttttaatcatgaagaaaaaggggcccgcgcccctttcttttactaactatggaaggtggtcgacatgtacaaaatcatcattccttcaatactagccatcttcattctctggatactcttacagatttcgctggagataagcatcgttaagaatccattgaattattttattgtattcattgtcttctttctctttattaagatggtgaaagagaagcaacagtaggttgctttcaatagctgtggaaaccagatttgtattggaatctggtttttgtttcacctcattgactgctaactagcaatagttttgcataaaattcaatctatcgaactattccacaaaatgccaggtgtaatactagagttaatttctcaatatacagaatgttactcaccaaattcttgcactagcaactttatctcgctcctcttcaaccaaaacaactaatgattctaatgatcgacagagttctatatgattgttcgttgaatcataacttataatttccaagttagcattctctcttgtagaccgaactaaatcttcagtcacattatctgaggccgttaccatataatgtgggcggctatttggatatacatgagcataattttctaaaatcaatctaatatcagggtcatttagaccgcaccctaaaaatataaatgtgtgggttaaggctaaggcatctaacaacttgtaaaaagtggaattattatacttagcttctgtatactgctttctggtgaaaatcatttgattagggaaatctatagtgccatgaatttttatgattatccgatcctcggatctaagcttatctgctaaatcgtcatcataatagtttttcacactaatagttccatttgattcttggttggcaaatgtatcatatattttatcaacatttggagtggctactattcttgaatctaatttaaaaatcgcttcatgaattctatgtttttcaaatccaggtctcatgaaagaatctttagctatctcattaaaaccatgggaacttaatttgtaataaattatttcacaagcagttaaataatctttttcagctataaaagtattaatatgttcagtattctcagagatattatctgaagctattctcaaaaattcttcccaagtaggtggccttttaccttgtgcatttatggaatttctagatattcctgaacctaaaaataaaacagactttcttctcgctatatctttcacgagaggaagtggccagctaatcatccaattacctccaaactctcaatcagtttccgagaaataccttccataatatatttaaattcttttactttagtaaaatgagcacctactactccatcttttgcttctaatctgtatactggtttatgggcaacttgtgacattggtattacactatggaagttaggaatacttcccagatcataatcattctctccaacctctttgttcaagacttcaattaattcccttttcatcgtagctggaattggttcaagtatacgttcaaatgctttgactggtctctttactccatcctttgtttttgcagtatattgttgagtaacatacccagcaaacttcaggttactctctgtttttaatccatctaaagcttctggatcttcattgtttataactccataattaaaccttgttttccaagcttctaaagtttggccaatgttctcaaccgccaataaactaaagatatcggaagacataggtgttataaaataatctgatgctaataatatagatctatttaatgagcctaaagatggccccatatcaaaaaaaacatagtcaaattctttacatctacttaacaattcactgaaaacaagcgttgtcctcaaacccctgggtaaaccagcaacagcatctctccaatcattggatagtaaatcctccatcaatgccaaccgtggatcgccagctaagaaactaatatcaaagttatttacttttattagatttaactcttgtgaatagccctgccctctatgtaagggctttaacatgtcgtatattgtgaatccatcttttttataataaacttcttcaaattgcttatcagatagtaaattcaccgtagaattacactgaggatcggcatctattagcagtacctttttatcatactcagcagctataaaacttgctaaattgcatactaatgtagttttacctactccgcccttgttgttaaacattgcaatagatttcataaataccctcctgtaacaatttttttctgaaatggacctggttatatattatcatgagtttaatgttttttctgaaaaaatcagtttaagaaaataaaatacttatgataaagctcaccgtgactaatctaagtattgtttttattaatagttttttgtttaatagggtacttttgctgctatcggccgtgcccctgctcaagactttcgagaccgttacggaactgcagtgcatgaacactgcacgttctgagaaaattttgtggctacaagttggattctcataaaataattcccgattattcaaacgaatcatggccttgtttctctgcatgggtaaatcttgaaagctttttcggataggtggagtgaacgctggacgaactcacaccacaatagggtcaggaaacttcatgaagggttgacgatacatgaatcaccacagcatggactgttaattcatgagaatcgtattccaaatgcgggtcgagaagctgtatcaattcattcatggtctctacttcttctttttcttgtagagccctgaacatccctagaaagaattatcaactaattttgaaaagaacccaatttaacttatgcttacaatttttactcctgccacaagggcctggttcatttcttcctaatattaattacccacaaccttcgctgtgcaaagatcatcatttatctttatcataatagttattaataatctaagagcatgcagataatttacataatgctcattttcattctcatagctagaagatgtaccatgtaaatacttgttccttaagtcatatccattgataaaatttttcttattcaagtagtaatctatataatcggattcttgccttgttaataatgtattttcagaaactaaaactctttcatttaataacttatcaacttcttgctttagagcatcagataacttactagtcacaactacaccgtttatatgaatataataatgtataagtgttcgattcctattgaccaacactatttcattaccgtcgtttacagttacataatcacgttcaataagccaatctaaagacgatttttgataatcctctatgtcatgtaaatacagcttatcagtagtcaacctttcaataagcgtattgtattgaatatcaccataattcgggaaataagtaaggttactttggtcagagaacataatatttctcaatattatagcctcatcattatttggcgctatatacacgtatctgtcttttgtcatgcttgggcattcagaaaatggcaaaggcttgctttccatttgtacaagttcttcatcaatgtaaccatcctctaaataaaacctatacttcttgattatgctttcaatagttggaaatatagatttgcacttttcaaaattcggattatctataggtggtagcttaatggtgaagtcctcaatatagaattcctcttttagataaacattgaagaaccattcaattattgattctaaatctttgtttttactctttagaaatgaataatatacatgcatttgtgctaaggataacgattctcttattgagaaagctgtacaggtcttgtattctttttcatgagcaaaaccaaatctttcaaaaaaacttgcatatatttcattatatgggaatttagaaaccatatcattatttacgaactcgaatatgtatataaagttgttcaataatgtaggattatcaaggtttgattctaaccattctttatcaacttctgttcctactttgcttaaagtgaaatgttgctttactgtaccctctacattttctttgaactcaactattatttccgttccccgcccactaccatctttaaagagttctctctcaagtctttcgcttactctttttgctttcagtttaactctagtatctaaagcaaactcttttgtattctgtacattactaagaagcctggtataatttaaattaggcttgtctaaatcaatataggtgctaataatcttttctttatcttctgtagttaatgattgtggcaaataagattcctctcgttcgctcctatgctttaataaatatttatccaaaagtaaatttgtacttccttctggattgataagcatgtattctcttaattccacgtcatatttcatcacaagtttatattgcttaaatatttgccatgcaaatacatcaagtttatcaagaaacaccttaaatctgctttctgtaatatcactcaacttccttttttctattatttcccaaaagcattccttatattcgaaatctacttcttcatattcggctaatatgtctgaatgatgattgatatatttacccactaacgatttagctataccgtctttttctttaagccattcctctttatcttcaccaagatataatagaaatgtatcgtccttcacatacttgattatattatataattctatagcttcattgatattctctattgtatgacctatcgtcaactcctcataaacttctttagccttatctagcatatatccttttgccaaatctggccctttgtagtactctacacctctatatccttcctttaccacattcccctctcctttctttaatattaatattctttggcaaactcctacgttgccttctcttttgattttcaaagtcgaattggaaggattctttttacgtcattactctgttactattagcaaataaattctttactctaaaaacctcactcacttatgataaggctcaccacgattaatccgaaacgcccgataaatctgctcaactagtatgagccgcatgagctgatggggaaatgtcatcttcgagaatgacagtttgtcgtctgcccgtttcatgacggcgtcgcttaggccgagtgagccgccgatgacgaaggtgattttgctttttccataagtcgccagcttatctattgtatcggccagttcttcggatgttttcatttttccttcgatggcgagggcgatgacgtgggtgtccgggctgattttggccaggatgcgttcgccttctttgtctttgacgattttcatgtcttggtcgctcaggttttccggcgctttttcgtccgggagttcgatgatgtcgatttttgcgtaggctgagagtcgttttttgtattcttcaatgccttgcttgaggtatttttcttttagttttccgatggtcacaatattgatattcacaggtcatccccactttagaaacaagttattcatatatattgtccacaattgtggatatcttttctgtattttgtgtaggatcattcgttccctactagatatgttgcagtgtccccacataattcacaggctgtggataaactgttagtatgttcgatttttctgatttcgggcggaagctcatgatcatctatgtacatgtccagcacggtttcgatatgttcttcacaagaataataagcggttttcattgttacatcctccgattttcttttgcacgcggcaattgttctcttttcaatataacctatttatacacatgttagtagtgcttcgggctgagttttatccacaattcggcaaatcacgcgcaaaaagagccggcgtttgcagcatccggctctttacgtgttttctcttttttctaagcgaaggacgaacagaattcctaatagacacgccagcagcgtacagcatacatcaatccagtccggctttccgccgtttaaaaaagagttggttatcacggaaaccaggagaatggttacggtcaccgcggcaagctttttcttcatcggctccctccttcatctgactgtcttctgcttttacggttcaaattcctctatctctatgttcggtcggcttttttcttgctatatagccttatcatgagggtcacaacgatatatacaatcataaacaatgccccgttactcacatcagggtatccaatcaacatattcattatgacaaaaacaatggttatacaaatgacggacaacaataagaagatactgaatgatttcaaatgaacaccttctttcttgcgataacgtttcattataaaaagcttaccgaaagcggtaagctcttccgaaatgtttatactcttcaaaacccacccatcacctgcacatcatacagcttgagatggcttttcggcgtcacgatatctttcaggttcgggatggtcaggtcgttcagccttttgcccgttttcaggtcgaaggattcgattttggcgggctttttgtagctgtacgtaaacagatacagctttccgttttgatgggtcagctctttaaagtcggctttcattcgtgatgcggagagcttgaaggcctttttgctttttccggtctcagggttgatgcggtacacgtttccgaagccgtcaacgaaatagaagctgcgctgctccatgaaaaagctttttttgaagctgaacggcatggagtcatagatcgtctgttcgtcatttttataagcggcgatgtcatacgttttgatggcgtcgctgtttttcatgactttcaccatttgatagatgtgatctgctttttcccctctggtgacaaagcagacggcgctgtcgtccgcggcgagctgggattcgacagacgtgccttctttatacgtccatgtcgcgattgattttgtatggagcttctctttatcagcctgaatgtcttggacgtgatagcctttttcgtcatctgtcggcgtgagtgcgaaaagatgatctttaaaaaagcctgaagcgcggatatagtgcgggatgacgtcttgcttccacttgccgtcaatctggcggtacagctctgagcgatagctgccgccgctcttgtcgtagcccgaattatacagcgtgtaaaagcctttcgcccgttcgatatatcccgcgctgtctcccgtatgctggtatgctcttttatatgtgtgaaggccgtcctgaacggtatagattccttttttgtcctccagcagcacgctgccgtcatgcactttggccgatccgagctcaagccccttcatgtgataagaagagagccgtcctttttcatcggcgaagagggcgtagctttttccgccgccgaacgtgtcttggtcagccgccgtggagaagtacagcagcgcctctttatctttcagaaaatcagggtcatttaatgtgtctctcgcaacctccgcagggtcttccgtgcggaaatagaagaagcataaaaccgctgcggcggcgatgatcactaagggtatccagatgatttttttcacgttgttctccttagtgaatggtcagaatcgtggtcgtgtaggacgagcttgtgatgtcgcgcgggtatacgcctaagccgccattagagtcgatatcaatcccggcttttaagaggaatgccgaccacagcagttttgagcagtttttggcgccttcatggcccgtatttctgttattgacgaagttgaaggagtactcatcaccgactcttgatacagcccagtcagcggcggcttgtttttgggcatcggtaactttcacggtctgaacgattgaattgtcttcgacttctctgccgttataagcaatctggcggacaccgtctcccggcacggattccacaattttatcagcggatgaatacatgccgacatgcccgtggttgtaataagccgtgtatgagttcgtgtaataaatattgccttttgtgcttttcggaagttttttggttcctgacgatccgcccatcgcagagagcccttctttggaagcgattacatttccctgcaccttgtctgccgtgatttcttgatgaaactgcttgagaattgcttctgttgaaacgtgcttctgtttggcaagctctttggcggattggagaacgtcttgaggagtcgtgccctgctgaagctctgcgatttcttttgcgtagcgggctgtttctgtttctttcgcttttacattcataccggagaatgacagaaccatggtgaatgacagggcaaacgggaggacggctttgaacagctttttacacatattacttcgcctcttttctttgagtataatttttccacatttgtactatatgacggaattgcgataaaaaaatagataatttacagatttttaaaaattttataacaatatgtaaatcatatgcataaatcattttcaaatatcaggaaatccggttatcatacaagaaagggggaggacatatgaaggacagaacgatcggttcgatgcgggtttccgcaatggggttagggtgcatgggcatgtcggaatactatggcagccagagtgaggaaaagtcgatttccaccctgcatcatgccgttcatctcggcgtgaatttgtttgatacggctgatcaatatggattgggtgcaaatgaagagcttgtcggcagagcactcgccccattcagaaaggagctttacctcgcgacgaaattcggttatgtccgaagcgaaaagggtgagtttatcgaaattaacggacggcccgattatgtgaaaaaagcgtgtgacgccagtctgaaacgccttgggacggattatatcgacctttattatctgcaccgggttgatccgcgggtgccgattgaagaaaccgtcggcgccatgaaggagctgatagacgaaggaaaggtgagatatatcggattgtcagaggcttccgcagaaacgatcaggcgcgccgtccgcattcacccgattgccgcgcttcaatcggaatattctttatggagcagggaagcagaggagcatgtgctgcccgcctgccgtgagctcggcatttcatttgtgccttacagtccgctcggcagaggttttctttccggaaagatgacgtcgaccgagcagctggatgccgatgattacagaagaagaacgccgagattccagggagacaatttggcggtgaatatagggctcgtccaaaaacttaccgccattgcccgggaaatgaatatcaccgcgcctcagcttgcgctcgcatgggttcttgcaaacggcgatgaccttattccgattccgggtacaaaaaagaaacactacttggaagagaacctcgccgctctcgacattgtgcttcccgaggatgtgaaggcgcggttggatgagatgtttccgatcggcacggcggccggcgagcgttatccggaacacatgatgacattgttagatgaataacaaaagaggcccatcgtgcgggcctcttttcatgacagctttttgctcatgatgacatccgtctccagaaatccggtcttctcatacagcttccgcgccgtttcgttatgagcgaacacatggagagaaatcttgcggacacccaggtctttggctttgtcctccagccttgcgagcgcctcttttgcatagcctttgccgcggaaaggcggatgaaggccgaaatcataaataaacgcgtcctgctgcgggtggtccggatcggcgtgcagccacagccagccggcattttcttttccgtccaatgtcagcgtccataaatagtgatcgtccgtctccaagccgtcaggaagcaggtcattaaacgccagctccgctaattccggcgcttcgtcaggcagccacgttcccgcttttaccttttcttcagcgtaatgcttggttgaatgagcgagataggactgaaattcttgttctgtcatcggctgcagcgtgatagccattgaatcactccttacaaaacacagattgaaagcggtatcatgaagtattatccgaaggctccgttttccgccggttttatgatttgttcggcttgtgccgttgaaccagtttgcgcaaataatccaatcgaaatgagacttgccaaggctgctgagagtacaatgaatttacatgttttcattacgaatcccctccgttaatctcaaaatttggtcattggcatcaattgattcttgaaaatacttcgccgccagtttgtaattctcctgttttttaaaatgcgcagcggcttgatatgacaaatcggaaacgtcactccacagctctttccttcttaactcggcgaaagctgattcaagcgcttcttcattgcggtcaataaagacatgctgtaagatgcgcagcttttcggtgtatacgggctcgtttttttcttcagcggcattcagcgctttatgcagccaaaaccggccctcatccgcctgttcctgtttcaataacactctggccagcatgtacagactccgcaccgaatatgctgattgcaaatgctccttttgatcgagagccgtttcaaactcgacccgcgcctcctcaagcttttcctgtctttcatagcaaatacccgcgttaaagtgggcgagcgcttcaatgtgcggatcgcccgctttggcggcttgatgaaccgccgtctgcaggagctcttcggctttctgatagtgaaacaagtccattctgttacagccgatcaccattaaacactgtgcttctctgaccgcgtacatttcattggctttgtagatctccaacgctttttccgcgtggttcatcgcaaagtagttttggcggatttcatagtaggcaatcgccacttgataattaaactcggctctttcaatctcattcggtatgtgccggagcctgctttcagcaatccggtaaaaattaatggcgttcataaaccgtttacggtaaaactcgtgcattccggaaaagaaataataatagtattgaatcatctggtctgttttttctttatcggcgttcagctggatcgtttttaaaatgccgtctgttttctcatactcttccatcaaaagtttgtagcgggaatcaattaaattaaaataaaggagcaccgtttgattttgtgtcatattttgcagatccgtaagcagttgttctcttaacgcctcagccgattcggtgttgtgctttttgatttcctcataccagtcactgatttttttcgcaactgtttcgtgggccatcacctcagccatctgtcaggacacctccctttcccattttgtgtaataaatatatcatatttacaggttcaaaaagagggtggcagcccgctagtttcctcgtggcaacaaaaaaacctccgcaggtgcggaggcgcatattttatagtagtttttttcctaacaaagattccaccagctcgaccgctgttttgccggttttgtttttgtgatcgaggatcgggttgacttcgacaaattcagctgaagtgatgatgtcggcatcatacagcatctccattgccaagtggctttcacggtagctgatgccgccgacgacaggtgtgcctacgccgggcgcgtcgctcggatcaaggccgtcgaggtcaaggctgaggtgaacgccgtcacagtctgacaagtagtcaatggtttcttcaatgacctttgtcatgccgaggcggtcaatctcatgcatcgtatagaccttcatgcctgtttccttaatgtactcacgctcgccttcatcaagcgatctcgcgccgatgatgacgacgttctccggcttgattttcggggcatacccgcccagattcaccagcgtgtcgtgcccgacgccgaggctgacggccagcggcattccgtgaatattgcctgacggcgatgtttccagggtgtttaagtcgccgtgcgcgtcgtaccagatgacgccgagctgtttatagtgctttgccgttcctgtcagcgttccgatcgcgatgctgtgatcgccgcccaagacgagagggaaccgctcattctcaatgacgctgtccaccttttgggcgagctgctcgttccccgagagcacagagttcagatttttcagctcttcatcatttttgagtttttcacgattgacggggatgtcgcctaagtcttccaccgcataccccatgtcagataaccgttcaatgagatgcgcgtagcggatggcgctcgggcccatgtccactccgcgtcgtgcttgtcctaaatccatcggcattccaataactgagatattcttgttcatccgtttttccacctcaacatgttgtatgttgtcctgtgcgggtttctcaaagatgacttggacacgaaaagatttaaagctctatctgtttttctgactgcttatgcttttttacatacagatgatagacgataacgcacaccgccatgaacgggatgccgcaataaagggcgagccgctgttctgaatcaaatgcgaggctgatcagaacaaccgtatttaacgtcagcccgataataggcagcaccgggtacagcggtgttttaaacttcaggtcttccactttgccgccttcgcggatgtatctccgtctgaacatcagctgtgacagggaaatcgtaatccagccgacctgcgcgcttagtccggctaatgataagagaaacatataaacggtttccggcgctgccactttagacagcagtgacaggcaggcgacggccagcgtcacgatcagagcgttcatcggcacgccgcgtttatttattttgccgagcgatttaaaggcttgtccttcgttcgccatagcatataagatacgcgtcgatgcaaacaggcctgagttggccactgagagcagcgcaattaagataacaaagttcataatatcggcggcatatggaataccgatttgttcaaacaccacgacaaacgggctttcgaccactcctgcctgcctccacggaatcatcccggcaatgacgatgatggagagaacgaaaaagacaagcgttctccataccgtctgccggatagagcgcggaatcgttttctcgggattttcactttctcccgcggcaaccccgatcagctccgttccctggaacgcgaagtttacggtaatcatcgtaataagcatagccttaatgccgttcggaaacaatccatcctcataaaaatgagagaagaaaggagcctgctcgccgtgtttcatgtcaatcaggccgaacatggcggcgccgcccaaaataataaacagcagaatgactaaaattttaataccggaaaaccaaaattccgactcagcgaacgcttttgtggtaatagcgttcaaaagaaacatcagtccgacaaacacgaggcaccacacccatacgggaacatgcggaaaccagcggagcatcaattgtcccgcagataaaaactcaatggcgcatgtcaccgcccagccgagccagtacagccagccgaatgcgaaaccgaaagcggggctgatgaatttggttgcgtacgtctgaaacgaccctgatacgggaagggcaaccgcaagctcgcctaagcagagcattgtcaaaaacattataaaaccgccgaccagataagacagaaccgcgcccagcggtcccgcctggttaattgtaaatccggtactcaggaaaaacccggtgccgatcactccgcccaaagaaatcataaacaaatggcgtgatttcattgtgcgctgaagctgattctctttttgatttgtattcactattctgcaccccttcagcaacttgtattggaaccaagccggtgctttgaaaccgatttgctgtccaaagagcctctatttgtatatgaatgttatatgaaattcattttcgtacataaagatacattatactaaaatactgtcgccgcgcaaatagagtgtgctgaattttttatttgtaaattccatacaagccgagggaaagcattgccgcatcaaagttttacgcgttttgaagcacgtttgtgatcttttggatcgcccagtccaagtcttccttggaaatcattaacggcggtgcaaaacggatcacggtatcatgtgtttctttgcataaaagcccttcgcctttcagcttttcacagtacgggcgggccgcttctgtcagttcaacgccgataaacaggccgcgtccgcgcacgtcttttatgatcgggttatcgattttctcaagctcttctttaaaataacggccaagctgaagggaacgctctgccagcccttcttcctcaaggacttcaagagatgcgagcgataccgcgcaagcgagcgggtttccgccgaatgtcgagccgtgggaacccgggttaaacacgccgagaatgtcacggttcgccgcgatgcaagaaatcgggaagacgcccccgccgagcgctttgcctaagatgaacatatccggtacgatattttcccagtcaaccgcgaatgttttccctgtgcggccgagtcccgtctgaatttcatcagcgatcagaagcacattttcttccttacaaatggcggccgcttcttgtaaaaatccttccggcggaatgacgatgcccgcttctccctgaatcggttcgaataagaaagcggctgtgttcggcgtgatcgcccggcgcagcgcttctgcgtctccgtatggaattaattttatacccggaagcataggtccgaaaccgcgtttatactcatcttctgaagaaagggataccgcaagcatcgttctgccgtggaagttgccgatacacgcaatgatttccgcctgattatccgctactcctttgacctcatatgcccagcgtctcgccgctttgacagcggattcaacggcttccgcccccgtattcatcggcagaatcatatcttttccggtcagcttggctgttttctcataaaacggaccgagctgatcattatggaacgcgcgtgacgtcagagtgattttatccgcctgatccttcagcgcctgaatgatcttcggatgtctgtgcccctggttcaccgcagaataagcactcagcatatccatatattgattgccttcagggtcttttacccaaacaccctgcgcttcagaaataacaatcggcagaggatgatagttgttcgcgccgtaatgtgaagtttggctgataatttcttgagattttgtgaaagctgacataatctgattcccccttgttttgtaatcattcaacattagatcttgctttccctttttataaagcaagttccgtgccaatccgaaaaaacgggatgtttcgccaacattctttcttttcccgcaaaattttccggcagtttgtgtgcaaacttcagccaagcgcaaaatttttttgcgtttcccgctgacaaaataggagcaatccaattagattgctcctactcaacagttatttattcaattgtctctgatatacaatgtaagaatatagtaaagataatatgatacagccgattgccgcaatgaaaatgactgacactctatataccggcggcaaaaaggctgcaagcatcatgagcatgcccgctaagacaaaaattttcgaactaaccctgtgtgtatccttccaaacgctttcactgctcagcgtccaaggtgttcttatccctaaaaagaaattaggcttaacgatctgaatgaagtttccaaacaccatgaaaatgactcccacgataaagtttcctaaataagatatagggagatcatatcccaggccggtcaagatggtcatcagattaatgacaaacagaaccgcaaacattgtattaaatatagccatatatggccggataaatgttttgtagttatttttaggatcaatcttagggatgataaccattaaaatatatagaataatcatgatgccaataagcatcatcatcgcattagctttcgtttggtaatcatttgcacttccgtttaatccccagtgtgtcgccaaattgtccggtaaagatgaatatgtgcaaacccatatgaaaacagttaaaactatgattcctgccgaaaagagatattttttcatgattccccgcctttcttattatcatgttctgaatcagtcagagaaaagaaccagcctataagatcctgcaatacagtggtatttaatgaatacataataaattggcctttcctctcatcgtgaaccaaatcagtatttttcaatatggtaaggtgatgagaaatactgggttttgacatgtcgaagtgttccgcaatttcaccagcggtcatgtcttgtttctttaataaatccaaaattcttctccttgtaggatcggccagtgctttaaaagctttattcaaaaactttccccctctcatacatacataatttagatatttaagtatatatctaaatatcaaccatttccctaaaaaagtcaatggtttttttaccttaatttccatttatttttaaacatcgtccaagcgcaaaatttttttgcgtttcccgttcgatttattttaaaataatgaatgttaagacgattgagagggggaattgacctgcacacaaccagcgaattttacacactcgtgttacaaagcattctggaagagattgatgtcgggctgcatgtggtggacgaaaagggcagcaccgtcatttacaataagaaaatgatgcagattgaagatatggatgaacgggacgtcctgcataaaaacctgactgatgtatttatgttttccaatcagcaggacagcacgctcgttcaggcccttcaagaaggcaaaacgattaaaaacgtgaagcaaagctatttcaataacaaaggccaggaaatcacgacgatcaaccacaccttcccgattgtgcaaaacggcgagatcaagggagccgtggaaatcgccaaggacgtcaccaagctcgaacggctgatcagggagaacatgcacaggaaagaacagaacagctacacgtttgacagtattctcggcaacagcccggtcattcgggaagtcatcgaaaacgcgaaacgggcaacccgcacatcatcatcggtgcttttggccggcgagacgggaacgggcaaggaactgttcgcccaaagcattcacaacggcagccagcgctcaggcgccccgttcatctcacaaaactgcgccgccctgccggatagcctggtcgaaagtattttattcggcacgaaaaaaggcgcctttaccggagccatcgaccagcccggcttatttgagcaggcgcagggaggcaccctgctccttgatgagatcaactcgctcaacctcagcctgcaggcaaaactgctccgcgcccttcaggaaaagaaaatcaggcgcatcggatcagcgcaggacaaaccgattgacgtccgcatcatcgccacgatgaatgaagacccgatcaccgccatttcggaagagcggctgcgcaaagatttatactaccgcttaagcgttgtcacgctgatcattccgccgctccgggagcgcaaggaggacattctgccactggccgaagtctttatccagaaaaacaatcacctgttccaaatgcatgtcgattcgatcagtgacgatgtgcagcgattcttcttggaatatgactggccgggcaacattcgcgagcttgaacatatgattgaaggcgccatgaactttatgacggatgaaacgacgattacggcggcccacctgccttaccaataccgcatgaaaatcaaaccggctgacacggaaaccaaagccgccgcaagcacccagcccggcaccgatttaaaagacaaaatggaaaacttcgaaaaatacatgatcgaaaagatcctgagaaaacacggcaataacatatccaaaacggcaaacgagctcggaatcagcagacagagcctgcaataccgcctgaaaaaattcggtctggaccggatgaaatgaatccatacaaaaaaaggctgagatgctcctcagcctttcgtttatatctgattggcaagccgctctccggtaaaccaaaagttctcactcactgccaatgtatgttccgtattctcgacttgatgccaccaatggcgcggcgcgtaaatgatttctcccgccttttgtctgaagcggatcggagacgccttttgcaccagcggtttttgctcaatgtctttttcatcaaagacattgatatttccttcgtacaaatacggagagtcgtccggatgatagaagatccattccttctccccgaaaatgacgccgttccacgcgtgcgtgttgttaaaatcctgatgcagcggtgtgcctgtctgcttagaaccgagaaagaaccatttccagtcccgtcccgtttcttcatccgctctcaatgtgtcttttgtaaaatactcgggtgcggaatagacaaggtctaagtcattttggttcagctgcgtaaaattccagtcacagtaccatttgtcatcattctgatcaatgtactcgatatagttggaaagctttacttgtttaaacgttttgaccccttcgatatctgatttccggatggtgaccattctgtctccatagtgttcatcaatgtattcaagcgtccacggcctgcattcccagtgatccattgcccccgtcaaaataaaaggtttcttatcagcatactcgcttacaaaaagatcgtacgataactcattgattgtcagtctgtcaatggtcatatccattccccttttattcggcaatctgccgttttttttgtttggcgtaactgtatggacctgaaaagatggtgacgttttgattctcaagccagaaaatcttgttgaacttctccagcaggtttctgtcgtgagaaacgcagatgatggtgccttgaaactgcatcaggctgttttcgagaatttcctgagattcaatatccaagtggttggtcggctcatccaggatcaggacattcagctttttttccattaagatggacagcttcagcctgattctctcaccgcccgacaggacggaaagttttttaaagaccgacgacccgtaaaatccgtacttggccagcatattccgggccatgccctcttcagtcagcagattttctttaaaaaattgcagaatcgtctgactcgaatctccgacatggctcttttgatcaatgtagcctattttaagattttctcccactttaatggtgccgtccgacagttctctttccccgatgatacagcggatcagcgttgttttgccgacgccgtttctgccgacgatgccgattctgtctttatgctttatgcgcagattcacattttgatataaaagggaagatccgttggtcacctttccgttttcaatgaacacaatatcttttgaaccggcgcccgcttcctgaaatgcgttttttaatttttgctccgtccggaccggcttattgatcagctcgatccttttcagtgccttttccatattattcgcgcgtctgtgcaggccgacagacggcggatttgagcggttggcccaatctctcagctgggcgatggattccttcatcttctgtatttttctctgctgttcttcatatttctcaaactgggcgatgatgaattcttcccgctttttcaagtattcgctgaatccgtaaggccaaatcttcacctcggtatcgtcaatctcgagcaccttcatcgccgtttggtcggcaaacgttttatcgtgggtcgtaaacagaatggttttgttcgattttttaataaacccttcaagccactcaatcgcatggacatccaaatggttggtcggctcgtccagcagtataacgtcgtcgttgcggattaaaatttcggcaaggccggcttttgttttttcgccgccgctcagctttgaaaacggctgatcctttaattcgctgaggctgagcccgttgcatacctcgtcaatcatcgcatgcatctggtagccgttgttccgctcaaatgtttccgtgtattgactgtatttttccaataaagcagtcagctcgtcatcactcatcggttccgaaagcttcagctcaatggccttcatttcattctggatcgccgcgagagcttcaaacgatttttccagatattgatacaacgtcagatcctcattgggatcagcgatctgcttcagcaaaccgaccttcgcccctttgttgatcgcaatcgttccttcatctgcctcaagctctccggaaagcaccctgaacagcgtgcttttgccggaaccgttcggcccggccacaagcactttttcaccttcattgatgaaaaaagaaacttgtttgaaaatggtatctcccgctaaatttaccgtaatattatgaatattcagcaactcacatcatccctttgtcattctggttcaaagctcgactttattctggatggcgacgctcgctttcagtttgtaaaagctgagcatcataaacagcgacaataagatggatattaccccgattgcggtcagcagcaaagctgaatcaaaatagtccgttaagaatccgataaacggaaaggcaatgaacatgaagagcgaggtcatcaaactgataatggacagcagcgtggctctcgttctggacggaatctcattattcaccacctgactggatacgggttctatcacatcatagagcgcgttaatgacgacaaaagctgcaatcgtcacgtacagactgcccgatggtataaacagataggccgccccgatgatgcagaatgtcagcagaagcacgcgcctcggcgtgaatttttccgccggcttggaagaaaagatggagcacagtgcctgcaagatggacagtcccgcaaaaataatggatatattgcgcacggacagcccttcctgacttaacaaatcttgtccgtacatataaaaaaccgatgtaatcgcaaagaaaacggagagtgacagcaccagatatttaaaggctttgttcagcctgaagaaatctttgacttcttttaagatgtcaccgaccgtctgcgtttcgtgttcactgttttcaaatttaatttccgtcagctgtgtaatgaccgccattgcaatcagctgagtgacaatcccggcgataaacacatacgaccatgatatttcctgcaagtagccgccgatgcccatggcgatcgcaagaccgagtatgacaagtccgttataatttccgatggatttgccgtaccacttttctttcccttgttctttcagtgaatcaaacaaaaaggcatgatccgttcctgatataaacgtcagcccgataccgtatataatatgggcgatgaagagggcgatgaagttatggaagctcaggaacatcaccaaatagataatgaccataaaatggccgagcaagagcgatttttttctcccgattctgtccgagatgacgccgctcggcacttccgccagaaacatcgccaaattcaggaccgattgcaggatgcccactagaaacaatgaataattcatgcttgttaaatataaaatccaaattccccgttcgaaaaagaagtttccgaaaaaaccggagaagtaaagcaaatttcgattccgcaaatgaatacccctttccagctatctgcatttaacatcatgaacagaaaggagcccgtcagtctttacactaaaaccctctatacatggatcttgcagatacagacttttcccaaaacaaattgggcaataatgagttgtattctcgaataacccaaaaagttccttctttttttcagatcctatggcatcaatgatcgtttttttcttctctggatcgctgatgtcgcggatgaaatatttgatatagctcagctcatgcatgtaagccggcaggaacaaatggagctcaatatcaaacccgcttttatccatatggtaataatcattgaaatgactgacgcgggagacggacacgtccgctccggcccgccgaaacaaatcagccagcctttcaatgatctctccgttgggataataatcggcataaacgattcggatcggttcttctcttgtcaaaaggggcggatctttctgcggtgtcctcccgctttcccatataccgatcagtgaatcagtcggtgtgatgatatgccccaaatccccggccagcttttgtttatcaaaataatgctgaatgaaagttctcagcatgtcgtcctttaccttgaaggtaaataacatcggcaaatgattttctttaaaatcagcatactgccgatacctcatgtttgaatgatgaaactgggtgtggcaggtcacgtccgtttgattcgcttcgtacagcccgatgcttttttccagatcaacattcaaaataaattggatggtctgaaccgtgcggtgatccgcgggcgtcattttatattgcggattccgctcaaattccagccccttctcaaacgtgcgcttgaatcggtacgggccgttttccggcacatcgcccccggcggtccccggaatcagaaagccgctctgcaaaacggcttctatttcatcagacggctcgtccaaggtgacttcaaagcgtttttcgcccgttacgttcaccccgagctgatcggaagagacgaggccttttacatacggaacggcctgttttatgttcaggaaactgccgagatgggggctttgattttctttcgtcagatgatagatgatcgtttgaaccacaccctcggcgtcgcctaaatagtccgggtgaatgtccacctgacaggtgcggggatctttgcggatgattcggcagttatagccgtcctgcaggctttcatacataatgctgcacatcatcttgcttgtgtaatcctgcgtatctaatgggttcaagcgtatcgggcttgtgtcgatttctattttcagagggtcgcccggttttctcgccgtacgatgcatcgtcttcataaagcgctttccttttgagaaagcttcgtttctgtaatatgaaggccgtcaaagtccaggccgatgcgggtattcagggatttcgggcttccgcctgcaaggtatgtgataatgtcatgagacataaacgaggatataataccgtttgtcgctcctaaggaacctttgatcggttcatcggggtaacagttcagaagtccggccggcatgtttttttcataggtgacgccggattgatagaattcaggcgtgagcagaggcccccattggccgctgaagctgccgacacccccggtcataaacgcgatattccgctccttacaataccggtaaacccattcagaaatgttatggggtttgtcagcggcatttatgacgatatcaatttcgtacggatctaacacacgcaggtcctgcggctgtgtaatttcctgatggtaaagtgctgcgtccgcatggggattgatacccgcaatataatctctgcattctgagatctttaatttgcctacagaagatttattatagacgaattgtctgttcaggttatgtactgatacggcatcgaaatcaatgagaataaaatgctgcatgcccgccgccaaaagattttgaagaatgatcgttccgacgccccccagacccacgatcgctgccctgctgccgtctaatctgttttggatcagattagggttttggttgtatttctcaaaatggtacagctgcttttcagtgatgcggccttcacggccgttttgccatggctctattaaagcatccaatttcattaacgcatcgaaaaactggtttcccgcttcctctcccagaagatcagaaagctcttgtttttcacagccgatgatcagccgttcaaccgcctctttgatctcactcgtatgcgcaagcttaatcgcctttcgatattgaatgataatatgcgccgtgtaggtcagcacctgcacgctgtctttaaacttccagcgcttacagtacgttgacatcatgacataccccctgaaagataataactccccaatgaggggagtcacggctttactagcaacgatgcaccaagcttgctgtttctgtatcaagatcaagttcttcaatcttcatcagtacacaccccctttaccaataactagatattatcaccaatattggaaaaggacaagttattttttgaaaatttagaatttatatataaattgtgatttttcttccttctgcccggtttatcccggcagccgaatgatgaacacggagccttttccctgctcacttttcacttcaattgttccgttatggctgtcgataatggtttttgtaatggcaagacccagccccgcgccgccggattgacgggatcgggaggtttccgccctgtaaaacccgtcaaacaaatgaggcacatgctccggagcgattcccgttccgttatctgcaatcataagcatgattcctccgtctttctgcagggagacggtgatgacacccgtatcttcatccgtatgctgcaccgcattgtaaaagagattgagaatgacctgcttcattttgtctttgtcaaaaacggcttctatcttttgatcgacaaagaactcgagcttccggtttctcgcgagcagcttcagctgagcctccatttccaaaatgacgtctcccaatgcgccttttttcatttcaaagctcggcacccggtcaatcttcgcgagaaacagaagatcctctatcagcttattcgccctggcggattccgcgtacatgctttgaagcgctttttctttctgctccggcttctccgccgctccgcgcattaaaatttcgataaagccgtgaatggaggtaagcggcgttctcagctcatgtgatgcgtctgatacaaactgccggattcgctccttctcttctttttccgcctgaaaagaggtttcaatccgttccagcatctgattgatggagatgcccagcgactcaatttctgcctgccttttatcaatcggcagccgtttatcgagactgccggcatgaatgtcatccatcatacgcacaatgcgtgataacggcttgagtgtaagccggatcaccggcaagaaaacaaacaggccgatgaccaaagccgcaaaggaaagcaccgcgaaaatgctgatctggcggaaaagcgaatcattcagaggctgggtcagcgtgctcatctgcacaactcccgcctgccttccgtcaacggaaatcgcctgaaacacgacgatgatttcctgacctgacttattgtgagccacctgatagtgaagcgccatggtatctgtcagcgcatccctgtacacttttttcgggaaagaaggagcggcccccgcgtgcgggtcttctgataaaacagacatcttgtatgattgattgataaaagcaaccgtcaccccggggtaaatcaaattcggatgagccggtgtttcggaacgggcaagggttttgattgacctccatacgctttgatccattgaattgatatcactctgaatgctgatcgcctgattttcatacatcgtccgtgtcataaacatgtactgagtgccgccgatgaaacataacagcaaagccaaaatcgccagtgacctgaacaggagctggaaccgcagggttctgtacagccgtttcatgccagatccaccctgtacccggcgccccgaaccgtgcgaatcaccttgtgctctttgtccttcagcttttcgcgcagagaacggatgtacacctcgacgatattgtcttccctaaggaccgttccgtaatgaagccccatcgttaaagaatcaatgagtgcagactcgccgtctgcactcagcttgatgcctttcaacttttccatgatgcagtctctccttagatgtatcagcctgtgtttatttttttcgcttccccttctattattcgcttttatctgaaacaaaacggaatctaagctgaattggtgaaagtaaacgctgaaaacggagccatctgcaaataaaaatcattatctgccgcttcaattcagcagcaccagtctgtttcaatcacaaagttctaagttcatgtctacctttttttcaaatatatccatttttaactgaacgtgttgtgacccgcgttcagttcttttttatggcttctgaaaaaaggcataaaaaaagcgccctgaaaaaggacgtttaatatgacatgtttcattttcttaaattctgcattctaaaataattcttccttcacattcaccctcgatttcattcaatacgatgatcacatcagccgttttcatgtgtgtcacctcccgttttcataatagtataatattaacaaataaatcaataaaaaacagcccggttgtccgggctgtttttttatttctgtaatcgatccgcttctgtcagtttgacttccgctgtttttttctttcccgaacggtagaacgtgatgttcacacggtcaccgatctttttgcgatacaggcgctcacggagatccacaacgtcattgaccttatgtccgtcgaacccggtgatcacgtcgagctttttcaaacccgcttttccggccggtgaaaacgcgtcgacacccataatgaccgccccggttttaatgcctttcggaagtttcagcgtctggctccaatggtagctcgcaatatccgttaaggatttcatctcaataccgaggaaaggccgtctgacttctccgtatttttctaaatcctgaataacgggaatgacaagctttgacgggatggacaggccgatgccttcaacggcggattcagcgatcttcattgagttgatgccgaccaccttgcccgatatatccatcaaagcgccgccgctgttgccggggttaatcgcggcatcggtctgcagcacttccgcattccaatccggctgtccgtcgccgtttgagtcaacgggcaccgccctttccgtgcctgaaatgatcccctgtgtcactgatcccgcaaattcaagcccgagcggatttccgatcgcaatgaccggttctccgactttgacctgatcagaattgccaaactgggcggccgatttgattttatcagacttcaccttcagcacggcgagatccatcagacggtcgctcccgatcagctcagcaggcacgcgtgagccatccttcaggctgatctcaatctcagtcgcaccttcaatgacatggtgattggttacgatataagaagtgtttccgttctttttgtaaatgacgcccgacccgcttcccgcttcgccgccctctccccaaatatcggtcttttggatattgagaacgccgactaccgaatctgatacacggctgaccatattcgtgacagcgtcattgacatttacgttgactgttttcacctgttcgctgccgagacgctggctggtgcttttgctgctttctccatggtctccgcctgtccagtacggcagcaggaaagccatgagcgcggccccgaagatgacgccgatcagacttgatagaaagtaccctctcttgctgcggcggggctgttcggaggcgtactgttcatcatcgcgattataatccaccctatctcaaatcctttcaagagtactcgatttgcttatagtgtgggtcagatcggggattaataatcatgattcatttggaaaaattacacggcgcacagcggcgtcgggattttcggatcggtatcaaataactgaaacgtttccccggcgacaaatcctttcgcagccaatgtctgctgcacggacattctcgccagttccttcatattgttgtcttggctcagatgcgccaaatagatgcgcgatgtgccgtcgccgatgacatcagtcatggcgagcgccgcatcttcattcgagacgtggccgacatcgcttaaaatccgccgcttaatgctccatgggtatctgcccatttgcagcatgccgacatcatggttgctttcaaacacaaacacattggccgaacggataatgcctttcattctgtcgctcacatacccggtgtccgtcatcagcgcgagctttctgccttggtagtggaaaacataaaacatcggctcggccgcgtcatgggagacgccgaatgactcaacatcaagcccgccgaaggattttacgctttccatcgggaacaaaaacttttgtccggtatccagcttgccgatctgattctccatcgctttccacgtcttttcattggcgtagacgggaagtccgtactttctcgcaatgacgccgagccctttaatatggtcgctgtgctcgtgagtgacaaagatgccgtcgacgtcgtctatcttgcggccgattttctccatcagcccgtccatcgctttaccgctcaggccggcatccaccagaaaagagtgctcctctgtctccagataaaacgcgtttccggtactcccgctcgcaagcacgctaaattgcaagcccattgtgtctcactccattatttattttgattgttatcaatgactgtgctttccaatgcattcacagtgtacgtttgctgtgtctttttcttcgtcccttttgacttatcttcaattgtaattctccataccggcgccagcacctgcgtacttgtcagcgggtattgggcaatatagccgaacttgacgcttttaacggcgcaattcgcttttaagtaattttgagaatacaataattcgaccgcatccagctcaggaatcaggctctccgtctggatccgcttgaatgactccagcatggtctgctcgtaagatacgacctcgtttttatcgttcagatgcagaatcacctgtccgatcgcatccgtggacgagtcaaaatcctgataaatcaactggccgtcatacgtctggtaaaaaatgatctgtttttgatccttgtcgactttccacagtttatatttttcaccgccggttactttagagctgacgagcgattccgcatcctcctgcggtttttgcttcgataaaccgaccggatcggtaaatttcattttcagcgttgtgaccttgtgatcatccgccggcatctccattaacggcttttgatccttcaaagcatcaatatcttcagcggtaaataccttttggcccgccgtcagccggtagcccgtcgcggaatcagaagacaggtttccgaatgtgatgtgatccatctccatgtctttttccacatttgaatttttaatcacttcgtattcactgctcgagcgtttttcaaaaaactgatagcctagaaaaatatcgaggatgaggaaggcaatgatgaagatcgtttttgtcttattccactccattatcgtcctcctccttccccagcagatctttcgtaatcgggacgatcttcccgttgattttcatactccagacgggttccagttcaacaagatcattcgttgacgaagataccatttgataggacaggaagatctggtcgattttattcacgtcgtatttaacctgctgctccagcaaagacacaacctcattgccgctcatcattttcacgtcttttgttttaatcggattcggtccgagaacatagttcggccgcttgtagctgagaacctcgtcattggcccattgcagggtcaaaacaggtccggatccgaaaggcttagacgtgctgttgatcacaggcatttggtctttaaacatgtagaaactcagctgctggttatcactcacattgaaaaattgataatgatccgtccagcttcccgtatcctctaaatatttatagcttttcttaatcagctcccctgtttgataagaagcgctttgtgccaggttccgatgctggaattgaatctgccgctgtgtcgaattgatttccagacggctgattccgtcagtcagcacattccgattgtaattcgggtcttctctgaccgtgctcggatcattaaaaagcgtctgcttaaacaggttcgtcttaatggtttcagtgataaattctttttccttcatattaaaccgcgcattcggcatgagaaattctttgctttttccgaccgaatagaggtggtataacggcatactcgactttttgctgtacagctcattcatcagattgcggtaattcgccgattccacagtcacttccaaaatcagctgcttgctgtatgagaccatgtaaatcttcttattcgtcttattctcattaaacggaatgacaatatggtcaaatgagctgtattccattgacggattcgaccatttaaacatcgattggaagaaatcaatcggaatggtgtcattgaattgcagatcgagctttgccgaattgccgtttctgccgtaaagccaatttttaaaaccgagcttgtcgtattgatcggaaatatccttcatcccttttacttcccattgcggcaaatccgcccacaggtcattaaagagcgtctcatcatccactttgtaatgagagccgtttgtatgaataaacatatcccggggttttaccgtttgcgacactttttggctcgttttatcaattttatgcttttcccggacagtcgatttggttgaggccgtgccttctgaaaaattgggctggaatgtccaaattccccatgttaaaacaagactaatgacgaccagcactgacagtatgactgtttttatattttcacgcctcatcccaatcatcctcttgctcttctttatatggaagagtaaatgtaatcttcgttcctttgccttctacactgtcggcccaaatgtctccgccgtgcgcctgaaccatctcttttgcaatcgcaaggccgagtccggtgccgccgagttttctcgtgcgcgctttatccactctgtagaaacggtcaaagactttttccacatcttttttcggaatgccgataccttcatcttttacgctgatataaagcagctcttctttctcattcacatcgactgagaaagtgacatgtccgccttccggtgagtatttcagtgcgttagaaatgatattatcgagaacctgcgtcactttatcctgatcaatctccacgtacagatttctgtccggcagctcgcggataaattcgacatgctgttcttttgtcatttcaaaacgatcgataatcagtgacataaagcggatcatatgaatccactctcgattaaactgataatctttgctgtcgaatttagaaagctgaagcaggtcgttcaccaatctgatcatgcgctcagtctcattttgggtcaccattaggaaacgcggagcgatatctttattttcccacgcgccttctgcaagcgcctctaaatagcttcgcatggtcgtcagcggtgtccgcagctcatgagacacgttggcaacgaactctctgcgttcccgatcgagtttttcctgttcggtgacatcataaagaaccgcgattaaaccgtcgatttttccgtgctctctctgaataacggaaaaattcacccgcagtacagtcgtttcatcgtcacgttcgatctccagcagcattgaatcctgctgttctactaaatcctcaaatgtaaagttctcttttatgcccaataaagacgtaatcggcatctctaaagccgtttcacgtgaaacattcagcagctcaagcgcagggctgtttaaaagaataatagctccgttgcgattcgttgcgatgacgccgtccgtcatatacgcgataacggaagaaagctttcttctctccccttccgtcatggcttgggcatcttcaagctctctcgtcagatggttgaacgtcgttgcgagctgaccgatttcatcatgcccgtatttccgcacctttctggagaaattcccttttgccagttccatcgcctgcttacgcatatccgacagcggatgggtaatggtgcgggcgagaaatataccgagaagagccgtcagaacaagggctaagcctgttcctgaagcaagaatcgagttgacggttttcatctggttaaaggtatcttccatactggccacgacataaatcgcgccgacaacttcctgattctctgtgacgacaggttttgctgaaatcagcactctgtttttacttttaggatcataatatttttttgaataggcctgttttgttgagaaaatccgtttaaaaatcgggtcagtcgtctgtttccccgctatttcctcgccataaggcctcgaggaaccgacgacctcatagcttttatcaacaaatgtaatctcccgtatttcattattcttcgtaaaatcattcaaaatccgtttgacgtcatctttaatgacggtgctgtcattatctcctttatattcctgctcaatataataggaaagattgtcaatccgctgatttaacgataattcataggacttgagaagagaattctccacctgtttcacaaagtacacgccgataatctgcatggcgatgataatgagaagcacatagatcagcgtgatcttaaactgaatcgaccgaaaaaaaccaaccttattcatcgccggttagtcctgttcagggtttctcaagtaataaccgacaccccgtcttgtgacgatccagttcggatggctcggattatcctcgattttctcacggagacggcgcactgttacatccaccgttctcacatcaccgaaatagtcatagccccacacagtctgcagcagatgctcacgcgtcataacctgtccgatatgtttggctaagtaatgaagcaattcaaactcacgatgagtcagctcgatcgtttcttctctttttgatacgacataagcgtcagggaagatgacgagagaaccgatatgaatgtcattagaagctgattcttcctcagccggcgcaaccgtaagctggcggcgcaggttcgctttgacgcgggccagaagctcacgcgtgctgaaaggcttcgtgacatagtcatccgctccgatttcaagcccgatgaccttgtcaatctccgagtcttttgccgtcagcataataatcggcatatcatattttttccggacttcccggcacacttcaactccgtctttattcggaagcataatatctaaaagaattaaatcaggctgaagctcctccaccatttccacggcttcgtttccgtcgtacgcacaatgcacgtcatagccttcttttcttaaattaaactctaatatatctgcaatcggtttttcatcatcgactacaaggattttcttatccatcatcttgattttcctcctgccagaatgacttcatttcatctattgatgtttcatgatgatcacaattcggatcgtgaaaaacgttccccgtctattataacggtttcaggtcaaaagataaaaaaattaaagagaacagcgcaaaaacgtattgaactgccatccttttgtcatgttttttattttcttttaaaaaataatatttttttgaaacctcacgaaaaaaacgccgtctagtgtttgacgtcttcttctgggccggctgaaaagccggctctcccttttttataacaaaagaaaaaacgcacctactattgcagatgcgtttgggtaagtggctcgggacggaatcgaaccgccgacacacggattttcagtccgttgctctaccaactgagctaccgagccagatgtttcttttctatactataaagtaaagtaaaatggcggtccggacgggactcgaacccgcgacctcctgcgtgacaggcaggcattctaaccaactgaactaccggaccttacagtaatttgtccggagagccgtatcgtggcggccctccgaggacaaataaggagttagcaataacgctaaagtaaatcaatgacccgtacgggattcgaacccgtgttaccgccgtgaaagggcggtgtcttaaccgcttgaccaacgggccataaaaagtggtgagccatgaaggactcgaaccttcgaccctctgattaaaagtcagatgctctaccaactgagctaatggctcccgatgtgtcggattatgtatcatagagcattcagacaaaagctttcttgcagtactctattgaagctgttccgtaacaacgagatttataatatcatagaacattcgaaagtggcaactacttttttgaaaaaaatctattatttttttcctacataaaaaaacaagcctccgtgaccggaggcttgtttgctgcaaattcttagttagcgcggtatacactgcggatgacgttcgtttgtgaacggtcgggaccgacagagaaaatagaaagcggaatacctgtcagctgagatacgcgttccagataatggcgcgcattttcaggaagatcgcttaatgtttttgcgcctgtgatatcttccgtccagccaggcatttcttcatataccggttcacactctgcgagagctttcagacttgccgggaattcttcaatcacttcacctttgtagcggtaagcgacacagattttcaatgtttcaatgccagtcagcacatcgattgagttcagagaaagatctgtgattccgctgacgcggcgggcatggcggacaacaacgctgtcaaaccagccgacacggcgcggacggcctgtcgttgtgccgtattcgcgtccgacttcacggatttgatccccgatttcatctttcagctcagtcgggaaaggaccgtcaccgacacgggttgtgtacgctttagatacaccgacgacgtgctggatttttgtcgggcctacgcctgaaccgatcgtcacccctccggcgaccgggttggatgaagtgacaaacgggtatgtcccttggtcgatatcaagcataaccccttgagcgccttcaaataaaacgcggcggccttcatccagcgcgtcatttaagacgacggatgtatcgcatacatactttttaatctgctggccgtattcataatactcatccagaatatcttcaattttgaagccttccgtttcatacattttttcaagcagacggtttttctcttcaaggttccgttcaagcttttctgcaaacacgtcacgatctagcaggtctgcgatccggatgccgatccgcgccgctttgtccatataagcaggtccgatgccttttttcgttgtgccgatcttgttggcccctttgcgttcttcctctacttcatccagtttcagatggtatggaagaatgacatgggctctgttgctgattctcaagttatccgtgctcacattgcgttcatgaagatacgcaagctccgttacgagcgctttcggatcaacaaccattccgttcccgatgacacacgctttttctttataaaaaattcctgatgggattaaatgaagcttgtacgtgacgccatcaaacttgatggtatgtcctgcattgtttccgccttgataacgtgcgatcacttctgcattttctgataggaaatctgtaattttaccttttccttcatcgccccactgcgtacctactacgactactgaagacatatatccgtgcacctccgttaacctttcaaaacgatatctcattcaaacaaattaagtgtatcagtgccgaaacagaaagtcaatcgtaaatccgaacatttaaatcttatcaatctatatttgttcgccttaaacatgattaaaagcgttttctctttcatttgctatctattactcccgaaactttcatgctttaacaagaaaaagaacccgtaatcagggttcttcagacagtcacttatatgccgcttgtattcatcaggacgacccgccagccgtcaggatcttcgatggtcacgcctttttcttcccagtacgggttttcgggtgctttctcctcatatcccatctgctttaatttcgtgctgatgcggatgacctcctgctgatcctggatgtaaaagacaagcaggctgtcgccgtgcggaacgggcgccggctgagacgcgccggtttcttcggtgaattctaagtgatattgcgtatggggcaggccgaacatgacgccgctgtagccctcatgtccggaaaaactgccgaccctcttcagcccgaggccctcttcataaaacctgatgatttctttgagctgtccggtcggccgggcaatccggatttgcgccgcttgaaattgcggaaattcaattgtcatcatcattcctcccttaatgccattatataaaagcgctttctttttttcgtctgccgaacggacggcattctctcattctttcggatgaaaaaaagcctcaagacattgcttgaggctttacgcacctgccggaacaccgccgtcatcaaagcgcctttccaggtttacgaacttattgtattctttcacaaaagccagtgagacggtgcccaccgggccgttacgctgtttggcaataatgatttcgatgatgtttttgttttcggattctttatcatagtaatcatcacgatacaggaaggcgacgatgtcggcatcctgctcaatacttcccgactcacggatatctgacatcatcggacgtttatcctgccgctgctcaacaccccgggagagctgagacagggcgatgaccgggacttcaagctcccgcgccagcgcttttagcgcccgtgaaatttccgatacctcttgctggcggttgtcgcttgaacggccgcttccctgaatgagctgcaagtagtcaattaaaatcatgcccaatccgttctcctgcttcagtctgcggcattttgaacggatttcgctgacgcggatgccgggggtgtcatctataaagataccgctgtttgacaggcttcccatcgccatcgtcagcttgccccaatcttcttccgtcagatttcccgttctgagattttgggcattaatattcccttcagcgcagagcatacgcatgacaagctgctcggcacccatctcaagactgaatatcgcgacgctctcatccgttttggtggccacgttttgcgcaatatttaaggcgaatgccgttttccccacagacggacgggccgcgacaatgatcaaatcattccgctgaaaccccgccgtcatccggtcaagctcaataaaaccagtcggaatcccggtaatatcgcctttccggttgtgaagctgctcaatgttgtcgtatgtttgcacaagcacgtctttgatattttggaaggcgcccgaattttttcgctgcgcgacctccataatcgttttttccgcatcgcttaataaatcttcaacttcatcctcgcgcgtatacccgtcttgagcgattgaggtcgccgttctaattaaacggcggagaatggatttttcctcaacgattttcgcgtaatattctatattagccgctgtcggaacggaattcgcgatgtccgtcaggtaagagacgcctcccacctcttctaacaaatcggtattcgcaagctctgacgttaccgtgaccaaatcaaccggttcaccgcggtctccgagcacgagcatggcattgtaaattttttggtgtgacattctgtagaaatcatccggaatcaacacttcagaagccagtgttaacgcagacggctgtaaaaaaacagcacctaacacggcctgctcagcttctatgttttgcggcggcagccgatcattcagaaggtctgtcatgctaagcaccgtcctctccttaaaaaatatccaaactccattttaccatttctcaagaaaaagaatagaaaaacatcactttccctgtatttgtcaaacagcggctgcgtgtttcgccattccgaatgccgggaaacaaataaataaatcgaaaccaggaggtaagaaggatgaaaacatatgcagtaacacccagtgttgatgcggacggatggtttgtgaaggtggaaaatgtggcgccgacggctctttatacatcaaaggacgcggcgatcgagaaagcggagcagacggctaaagagaacagcccgtctaagcttgtcatttatgatcagcataaaaacattgaagaagaacggtccttttaagaaaagccttcgcccgagcgagggcttttcttattcgatgaaacggatgtgcagcaccgtctgcgccatgagatcggccgttttttgatacagctcccattcttcacaggcggcgaatactttcatcatgtcctgcaatgtctgtttcagtataataaattcgtcaattgtccgcagttctgcggcttttttctgataatcagccagcttcagctgtaataacatcaatggcgattgcataaaaaacctcccccattctgttataaagccccgcttttcaaacctccattcctttgtcatatcctcttacgatagatttctgattttagtacaataaagaaacggaaggagtgatcacatgaaaccgctgcaaatttccgccgaaacggcgcaaaagctcgcagaatcactgaatatgccgcttgagagaatcatgcacatgcctcagcacattctgcttgccaaattagctgaagtccaaaaagagaacgatcacaaataaaggctgctctctcatatatatgtgcgggaggcggaagcgatggctttccgcctctttttttgtgaagaaaattttggcaaaacattctttgaacggaaccgatccgattttaaccgtctcacagctgaaaaaacttgttgacgaaggaaaagtgaaatatttcttattatccggaaacaattcaggcaacacaaagcttgtctcatggatgaaaaagaacggcacaaaaatctcagctgaccaatacagcaccggaaaaacaagctcagcccggcaaggaatgacaggcggcccgggcggacaaagtcagcagactctgtatgagatgaaaaaatagttcggaaagaggctggatagttaaacgccggcctctttattttgctcttgaagcacctgccatgcggcgccggtatcattcagaaaaatgattgataaatactttctatttttgaaaccatcagttcctgacgcagatgccggccggcataggagcgcgcttcttttccaagccgttccctgagagactgatccgtaatcagcattacgagagcatcagcaagttcgcggctgttgccgggctgacaaataagccctgtggcctcatgccggatcatctcagggattcctccgcagtcagttgcgacaatggcttgacctgagaacatcgcttcgatgatcgctatagggaaattatcattcaatgtcggcaggacaaatatagatgattcagccaaaagcgccggcacatcacgtcgttttccgaggaaaaacacatttgagaggcccagtttccgtctcttctcttccagaaaccctctcatgtttccgtctccgatgatccatatatcaactccggataaatggtgccggatgcgggcgagagcgtccagcatcacatcatgtccttttcgctcggtcagacgggaaacgcacgcaatcacgagcttttcagcacgttttgactcaggggcatcctgaatgtcaatgccggtatgaacagtcttcagctgagcctccttcgctccgtactccagcaaaggctcgtgaaaggagtcgctgattgtaatgattttatccgaagcttgaataccctgcctttctatttcactgaaatatgcctcttctattgaacccttttggattttatgaaacttcatccggcttttcgtaaaatgtccgtgcggcgtgaaaaaaagaggacgctggtacgtttgattaaggtatcccagcaaaaataccgcaaataaatcctgcgcgtgaaacaggtcatattgttctaagtctttctccttcaaaaatctttgaaagacatgtaaatagctgagattcttcacaaacttttcatttgcggcgccgtatctgccaacaagaaacgctctgatctcgtcagcggcccgcgggatatcttcctgaaaaaaagttggcggcatttggagcggcgagatgacatccgcctgatgaccgatgcgctcaaaacccgtcttaattgatgtgatataactcgccaaccctccgacattcgggtaacggagaaaggttgcgtacagaatacgcaatggcttttttcgtttgggggagctttttccttccgcacagaacgaatacagcatctctggctcaccttgatgttcgatcccgtaaaattgatccatgacgcgcaataaggctagaggcaccagaccgttcggcttgccgatctcttctttcacatccgctccccctctctcaaacttataatcctaattcccgtccccattttgacactttgtcaacatgatacggcagcagttcccctccccgattgtcgaagattctccgcaattgggtatgaagccctttttcaagtgttctctgcaaataagccattttataaagcgtcataggaggggtctgaaaatgaatgccccgctttttcatttctttcgtatacacttttacgcaatacgtccgaatatcttctgcgtgccggctccaatcttttctgaagccaagcagaatttcaaccagcaccgtcatatcaaaccaaaccggcgcgtattttgcggattcccaatcgatgaattgaatatcccacggttcatgcccggacgcatcgtgggtgcagatattctgcatatgaagatcaccgtgtgtgatggctgagccgttttgtatcaattcagggaaaaaatccggctcctcctgctcaagcaagtttgtgatttgtcgataatgaggcttcacgatatcttttgtgcgctcatctttaagagccctatccaataattccgctgtctttttgatctgctttttacgcccttttctcatggtttccgattcatataccggcagccacgaccgccatttaccgtcagaaatattcttgttttcaaaggtgcggctgtgcaattctgcgacagacggaataatatacttgaaatgcttcgggtgaaatgtaagctgtcccctgatctggctgacaaactccataaatatccacgtttcatggtcactttcttctataagatagatgtccggcagcaaatcccctaaaacggaacgggctttcccgtatatattaatctcgaccttatttttttcacgggaagatttatataccttcaatatcagcggaacagttccggattttttctttacaaacagtttataaatggcgcttctgtccgtcgatttcaggcatgtgatgtcatccggattcaccgcagccctttcaccgaacgaatacgacagtttttcgtcaattctcagtttttgaaatgcgccatacaaaagatccttttcatacatgccgatcttccttccgcttccgtttccagctgtttttgagatgagaccaagtgtttctgataaatggcatcgggtcattccaagcaaaaagagcgtactctttttttcctttacaccctttccaaaaatcccggaacgtcatttctcctctttttcgtttcttcaaaaacgttaagaaataacgcacctcataaatccagttgattccgtctttttgttcgagctggggcttcacatgttgtccggtcaaatacagatagtacatgtaaacgaaatgaacgcctgccggttctgtcaggctatggctgagccaaaagcgcggattaatttcgataaacttgtaaacattgtcccggggatcctttttaaattccgccatgcctactcccttcagctgaatcgcttcaaaaaacggcagggtcttctcgattaaatcaggaagccgtttgctgacgacgtgggcccccgcgccaaaatctgcagggaattgatggttcttttgcagagagaataggcccattaatttcatttggtcatcataaaaagtggcgactttataaaaacactggttgtctccggggatgatctcctgcacgagcagttctccattttctctgtaggagctgaactccttgcgcaattgtgcggcatccttcattacaattgcttttttgtttactttttttctgtattcatggccggccaccggttttaaaatacacgggaagtcaatattggcgatggcctcttccagctcatcccggttgttcggaaaaaaggttttcgggcaggggatgtgatgcttgaccgctaattcatatgctttgcttttatctaagaccgtttctaacagagagcggctcgggagcaaaaacaaaaaaaagccggctaatgtctcgcggaatttagatataaatcccgcataatcatcagatcctgcgtacagaaccggctttgcttggaatcgcttcccgaaatcagtcagaaatgtcagcagttcttcctcttgtgttaaagggctgggacatatcccgcaatctgccaaccttgattttccgatacgataaggtccctccgtgtcaaacgcgtaaacatcgattcctcttcgggccaggctgcgaatgatcccaatcccgtttgcactgaaatcaagtacaacggctgcatgttcatgtttcatgatctccctccgagctgttggtattttgataaatcgattcgatattttttatcatcgtctcactgcttaaatatttctctgcgtaggcctttgcgtttgaagcagctatcttccgcgcagatttgttagtgataaaaaacgctaaagcccgggcaagaacctttgcatttcccggctcgacaataagccccgttttgttatggcggatcagatccggaatacccccgcaatcggtcgcgatgatagccgagccgctgaacatcgcttcaataatcgaaataggcagactatcattaatggtcggcagtacgaatatgtccgtcacattcaaaatagcgggaacatcatctctttttcctaaaaaggaaaccatagatagattcagttttcgagcctgttcctctaaggcgctcctcatctctccgtcgcccgcgatcagcacttcaacatgctcaagtacatcagatggaattctcgaaagtgcgtccagtaaatatttgtgaccttttctcgggcctaatcttgcaatacacgagatgatgatcttatttttcggtaccggggtttttcttttcccgcctgtttttgcatcgtaatcgattcctgtgaccaccgttgtcatgtcttcctgttcggctccgagcttcatgagcgggctgcggaacgtatcgctgataataatcaggcgatctgcgtattcaatggctttcatctctaattttttataataaatctcttctaccgagccttttttaaagatgtgaaatttaagtctgttgaaagtaaacatgccatgcggtgtgaaaaataaaggttttttatagatttgattgaacctgcctaacatattggctgtaaataaatcttgagcgtggaacacatcatatctttccaaatgaatcttttgaagcatttgctcgtatataaacatcagccgattatttttcaaaatatgatcgttataaaccccatatctgtctttaaagaaatcttttaatttcggaacaacagccgcccgcagttcttttacctgtgcggacggaaacagattaggggatatgacatccaccttatgacctctctttttcaggccttcactaagcgttttaatatagtttgataaaccgcccgtgtgcgggtagtcccaaaacgtggcaatcaaaatggataacttcttttttttcctgtataaccgcggaatatgatgttcatgtttcaactgtgtctttactgccgccttttttcgcgggcgcgttttgaccccgtagtagcggtcaagcgtctggaccatatacggataggggacggaaaatgtcttgatcatttccagatcctccgcacgacttcaaaagcttcagcgtattccacacccgccgtcatccctctgacttttcctaaatgttttacgccttcatatgaacggggatgagggtaatccctcatttctacgtcatagtggtgaagcgccgcgagtttggcatccattgtgtctgtgatgttaacgaagtaattaggcttgaagagtttatcagccgtattcctctcccactcgcttgaagatagcgtttcaaacgtaagcagttcgataggcttttgattcggaagcggtctggcggctgttaaaactgcttggaatgttctctggtggtccatattgatatcgccgtaatgatgtgtaaagattttatcaggctgatagacgcgaatgagctgctctaattctttgacaagcttatgaagagggatacattccagctctaaattcgtgtgctccaaaaagatgactttctcaattccaagctcttgattcgcgcgttcgcctaattgtttaatatgatgagcttcttcttttcttcctaatgccgtaataacggaaattactttatatccttcattgatcagccgttttatggtgcccgctgatcccaatagttcatcatcgggatgagcgccgataaccataatgtattctgccattttttccacactccaccaaacaaatgttacaaatatcatatgacgaccctacaaaaaggaaacttacatgtgcggattttcagaaacttacatgtgcggctgccattccaggtaacgtgacggatttaatttttttatagtgttcaaaaactcatccgccaagccgtatttgtccagtccttttaatagttttacgggaaagcgggtaatggcggaaaaagctcttttatggtcgatgaccttaagatttccgtgttcgttgatcagaatgtgcctgatttcggcatcccatctggtaaaaccgattctttttaattcatccagcatatttaaaatatcagcagtcagtttgacggacagggatttttcttgtttgatatggcgggcaagagaggtgccttggacatattccatcacaatataacgatctccgtattcatacagtcttggaatcaccggggaaccttgtccggtctttaaagctgccaattcctttttgcatgtccctttttcaaagaagtattttacgcatttgttgtgtgttaagcgatagacttccccgtcttttccatcaccgatcagcggatagtgctccagcgcctttttattctccggattattaaaatatgtttcagaaaaaaatcgtttcataccgacacatccttcgttatgatgtaatataatatgcaatctggtgatgatcggaaatgaaacaatctcatcattttcttgcgctgcgccgtctgctgacatgaaaaaaacccgccggatcggcgggtttttcattgtgtattacgcttcttcttttacgtgaaccttcagcacagcctgaacttcagggtgcagctttacaggaacgtttgtatatcccagtgtgcggataccgtcttggagctccaatttccgtttatccactttaatcttatgcgttttttgcagcgcttctgcaatctgtttgcttgtgacagatccgaatagacggccgccttcaccggatttggcactcagctcaacagtcagctgttcaagcgtttctttcaaatctttggctctttcaagctcggcaatcgcttcttttttctctttttctttctgtcctttcaatgcgctgatgtttgtcgcatttgcttcgacagcgaggccttttttaatgagaaagttatgtgcataaccgtctgctacgtttttcacttcgcctttttttcctttaccttttacatcttgtaagaaaataaccttcatctctgaacgcctccctcaaaatattcatcaatggcttccttcagccggacgagcgcttctgagacagaaatgcccgataactgggttgccgcattggttaaatgccctccgccatccagcgcctccataataatctgcacattgacctcgcccagcgatctcgcactgatgcacaccgtatgctcatcccgtctggctaccgcaaatgaagcttccacttcactcatcgataagagggaatcagccgcctgcgcaatcagcacctggtcaaagtactcctcttcgttctcaggaagagaagcaatcgcgatatgttctttataaagagacgtatgctggatcagcttcgcccgcttgatataagaaccgaccgattctttgagaactttctgcaccagaaccgtatctgcgcctttcgctctcaaataagaagcggcgtcgaacgtccgcgagcccgtgcgaagggaaaaactctttgtatccactattataccagctaacagggccgtcgcttcaatcatattgactttgagccgcttcggctggtattcaagcagctccgtcacgagttctgcggtggatgaagcgtatggctccatataaacgagcagcgggtctttaataaattcctcgcctctgcggtggtggtcaatcacaacgatgtgctcgattttgttcacgagacgctcttccatcacaagggatggtttatgtgtatcaacgacgacaagcagcgtgtcgtcatttgaaatttccatcgcctcttccggcgtgatgaaccgcgaccacagctcttcatattttttaatttcttcaatcagacgctgaacacttgatccgatctggttcggatcaatgacgatgtagccttctttgccgttggcctgcgccaccttcaatattccgattgcggctccgactgcgtccatatcaggaaatttgtgccccatgataatgacattgctgctttctgagacaatttccttgagcgcgtgagaaatcacccgggcgcgcacccttgtgcgcttctccatcggattcgttttgccgccgtaaaatttcaccttgccgttcggcattttgatcgccacttggtcgcctccgcggccgagagccaaatcgaggctggactgcgccagatctccaagctccttcaaggaagaaaccgatgcgccgatcccgatgctgagggtcaaagatacagtgtgaacagatgttttttctcggatttcatccaaaatcgaaaatttcgcgttttcaagctccgttaaaatgtgttcatttaacaccgcgataaaccgctccgaggacgtccgtttcagaaaaatgccgtactcctgcgcccacgcatttaataatgaggtgacctggctgttcatcgtgcttctcgtttggtcgtccagcccctgtgtgacgtcatcatagttatctaagaagatatatgccagcacggttctctcattttcgtactgcttttcaatctgaatctgttctgtcacatcaaagaaataaagcaggcgctcatctcttttaatcactactttaaacttccgctcattcaaggtgatcgtttccgaatcgacctcctgcttgatcagcggcacgacggcctcgcatgtgtcatacagcgagcgtccgacgagcgtgctttcattaaaacaggaagacaaaaacggattcgcccactcaatgtaatattgatcattaaacagcataatcccgataggcatttccattaatgcctcttcgcctacttttttcaatctatacgataacgtggagatataatcgtcaatttcttttctgatcagagaatccgcacgcttaatgaaaaacaagatcacggcgagcagcacaacgccgatggctcctatcagccagttaaagtaaatgctgatgagaattatgatgattgacaatgcaatcaatgcatagatgggataccgaaacaacggtttttcataaaaactaggcatttctatcaactccccacctgtaagtcacactcaatttcgcgtcaccttatttcttatgttaaagcctatgtcaatgatgcctaagaggagatacacggacaagatgagcggaaaaagcacccccagcacaattgctaatacaggaacggctttcggcatctccatttcgcggcaatagaaaaaaataaacgctaatccttgaatacaaatcagcaagctgagaataaatcccccattcaatgaaaccgaatacagcatatgccctttttctaaaggcagaaaccctaatatcgtcacaataaaatacagaatgacaacgctttgcgggagtttgagctctctaaaaggcttcatcttcggaagatcaggggaaaatcgccgtaaaagcggccttgccatagcataactgaggaaagaaaaaacgatgccggtcaatacgagcactgtcggaaaaagatattgaaccgtgctcagctgactttccatcagcttgatctgcttcccgaactggtctccgtaacccagctgttttgacatggtatcagccacagacagcgactcccgaagctgggacatggtggtatcaaccacattcatgttaaggaacacgatgctgaccacaaaaaaaacgacgccgcacagcacatacgccatagcgccggcagcaaccgcatagccggactgtttctttttaaaataatatcccatggcgattcccgtacaggccgccgtaaaagcgcctgtaagcccggtaaacgaacttacaataaagctgacaggaaggctggcaagccccatccataccccgggcttcagaccgtgccgaatggtgtaaagaatgatcggcagcggcaaagcaaagagaagaattgcccccagtaaagggaggtacacgaccaaaagggaaatgattgcaaaaatactgatcaaaatggcgccttctattagagcccttgtatttttcacttactcacctcaaaccttgtatcattcgaacatacgaatagaaaagagcagcttagacgactgctcttttgacgccgcaatgtctctttcaagacctgaattttccataaactctccaaaatacacgtatatattttaacataagtcgaaatcgcaagtaaaatgagcgcgggcagccgcaatgttccatgtgaaacatgaaaacagacaaacggacatcccagtgaaagaatgcccgttgtatcagtgatcctgatcatccatgaaaccagaagtatctctgtttttctttttggtttttcgtacatataacaagacgataacgataagtaagagagtggtcgcctgcaaaacaccgctgctgaaaaggaagaagttctttatcatgtcccacatatattttcacctctatttcgtatttcctttacattgattttccctttctggaaacttcaaaacatcaggaacaacatcggaaccggggcatatgctgatagtgaaaatgaaggataaaggagattcttacaccatgactgagcggagaacattagcatggcatgaaacgttagaactgcatgagttagtggctttccaggcaaacggacttgtgaaattaaaaagaacagagcgggacgtaagcgacgccagattaaaacagctttacagattttccatccattcgctggaacaaaatctgcgtgaactgcttcctttcttccctgaagctcccgcttttcgtgaggatgaaacagaagagcgcgctgattcctccttttacagcggcggcctgctcattctggccaaaacatctgtccgcaattacgccggagccattacagagacggccacacctcaattaagacacgttttcgtcaagcacttaaatgcggccatcaagtggcatcaaatggtctttgagtatatggaagaacgcggtcaatatccggcttataacctgagcgaattgctgaaaaatgacgtgcgcaacgccagaaaggccatcgcgatgaaataaaaaaaaagcagcaaggaatttaatcctttgctgcttcttatttttgagcggactgatcttgaggagacgttttttcccggtatgtctcgagaaactcccggttggcatctccccattttttcatttgcaaaacgatcggttccagcgacctgccgaattcggtaagagaatactccacctttggaggcacctgctgatatacctcgcgatgcacgatgccgtccgcctcaagctcgcgaagctgaagcgtcagcatacgctgcgtaatgctggggcaaatgcgccgaaactcattaaaccgcttttttccgccgatcatatgataaaacaaaatacccttccactttccgccgataacggaaagcgtcagttcaaccggacaaccttctttattcggatatatgttcatttttcatcctccatagtaccttttttgatactatatgctgattagcatctgacttacccagtattttactcgcaatcctctccacctctcaacaaaaatgcttctttttcacatcaatttttaaggttttgaagattacaccctcctcaagacgtgttaaactataaaaagattgtttacactacaaaaaaggacaaggagttattatggaaaaaattcttattttcggacatcaaaacccagacacagataccatttgctctgccattgcctacgctgatctaaaaaataaactcggcttcaatgctgagcccgtccgccttggacaagtcaacggcgaaacacaatacgcgcttgattatttcaagcaggaaagcccgcgtttggtggaaacagccgcaaacgaagtaaacggcgtcatccttgttgaccacaatgaacgccagcaaagcatcaaggatatcgaagacgttcaggttcttgaagttatcgaccaccaccgtatcgccaacttcgaaacagcggaacctctttactaccgtgctgagccggtcggctgtacggctacgatcttaaacaaaatgtacaaagaaaataacgtgaaaatcgagaaagaaattgcgggcctcatgctgtcagcaatcatttccgactctctgttatttaaatctccgacttgcacggagcaagatatcgcagcggcaaaagagcttgctgaaattgccggcgtagatgcggaagagtacggcttaaacatgctgaaagcgggcgccgacttaagcaaaaaaactgtggaagaactgatttctcttgatgcgaaagagttcacgctcggcagcaaaaaagtcgaaatcgcccaagtcaacacagttgatattgaagatgttaaaaagcggcagccggaattagaagcggctctttcaaaagtaattgctgagaagaaccttgacctgttccttctcgtgattacggatattctggaaaacgattcccttgcgcttgccatcggtgatcaagcgtcaaaagtggaaaaagcattcaacgtgactttagaaaacaacacggctcttttaaaaggcgtcgtatccagaaagaaacaagtcgttcctgttttaacagacgcgattgcagaataacaaaaacaccccggaaaccgggactgccccccgtttttgagacaggggtcaaaacaccttttaaacagccaattgccgatagtttatcggtgattggttgtttagtttggtttgaatacgaatattgttataataatgaatgtattctatgacagtgcgttctacgatggcagtcgtagttcgatcaatgctgttaagatagaacgtttcagactttagcgaggaatgaaacgattcgatggaggcattatcagcgggcgtccctttgcgggacatgctcatggtaatgccttttgttttaacagctttttgatact

SEQ ID NO: 3 - DNA, 499739 bp, Bacillus methylotrophicus
ccttttccgtaagtgtattgctttccaacaggctgttcgaatcgatgtgtatcaccagccttataccatctaacccatgtctgaacctgtgtcttattcttaatattcaactcctgcaggatctctttcataggtacgcctgccaatctcatttctacagccttctgtttcacttcaaccggataactcactcttgtccccatagaaaaaacacctccaagtctaatttcggataacaatcatccgtattcaaacttgaaggtgtttttatttgtctcatcttatggggtcagtcccgctcgccgagagcccgcacagtttttttatttagattcagaagaagttgaagtgttaaacgtgtcttttaagtctttgtcttccacttttacgtcagcttttttcatgactttttgaattgccgcctgtacagctgagttgtcgtttaatttctgtttaagaacttcttctttcaattcttttttcatgtcatcatatttgccgcgttcttctgtctttttgatgatatgataaccgaattttgttttgaccggatcgctgacttgtccgactttcaggccgaatgcagctttgctgaatgtttcatccattgactttttatcgaaccagccaaggtcgccgccgttgtcttttgagctgtcagttgaatattctttcgcaagcgtttcaaacttctcgccttttttcagctttttctccacttcgtcagctgtctttttgtcagcgacaaggatgtggctcgcgcggattttaccttttaagccatcgtaatattctttcgtatcggagtcagtcactttgatgttgtctttcgccgctttttgtgcaagcagttcgtacttcacctgatctttcaggtaatcttcgccgtactgctgtttaagggcgctgtactgatcgccgagctgcgttttgtactctttcagcttggtatcgatttctttatccgttactttgtatttttttgctaatactttttcttgtacgagctgtgtcagcacacttgcgcccgcggtttttttcatgttcgtgtagagctcgccttttgttacatttccggcatccgtcttggcaatcacgtcgttgtcgccgctgctgcaagcgctgagagccaggacgctcgttgccgtaatagctgctatcgcgattttcttcattcctttaaacactcctaatcatccaaattaaattgcatatgcgtatcataacatattgtggctttctgtaaaaagattttaaataaagggcattcgtctagtcaaactttttcctgatacatacaaatatattgatcatgaaaaggaggtaatgaaccatgggcggaggatattcaaacggtttcgcactgctcgtagtactgttcatattgcttatcatcgtaggtgcagcttacatttgttaagcgaaacggatcgctttttctaaaagcggtccgttttcttacccgggcgcctaatcgtttcagtagtaaattgcatatgatgtaattggaaaaataaaacgttttgtaggaggtgcttttggagatgggtgaagtatttgcaggcggttttgcattattggttgttctgttcatcttattgatcatcatcggcgcttcttggctttattaagaaaaaaatatggctgtcgggggtcagacctccgtcagccatatttttttgcctgtttacacagtaaaggagatctcgacgaatgaagagatcagtaaaattaaaatagatacattaataaaacggaataccttatcctgccggtcttcaggaatctctctgacaaggcataatgtatttgtgagcctgtttatgaaataaagaataaacagggcagccacgataaaatagaataaaatgatgggagattccccctctctctgaactgctcccatattacattaccaaatatttattaaaaaagatagaatgtaacctgaaaaatcagcgggacatcaagactccggcactttttttactaaaatatcaaaaccgtcggattcctggtcaatcagacatgatttgggcgctttgaccagatgcagggcaaacagaagatcaggcaggcaataccccgcatggatgctcgaaatcatataaaagtaatgagcgtgtctcggaaatgccagtccggcataaaacaataacggcgtaatgaataaaaacgggctgatcgttgaaatcagcatcgtcgttttcggtatgcctttccatgtcggcatccgcaagaagtacattttcatttccttttttctttttttacagatcatcggcaggacatgtatgactttatgtacaaataaagtaacaacgagcagaacacaaaaagcaaacacgtgcccgtcacttaaactgatattcggacgcagcagcccgaatgccaagaagttgcatataaaaaacaggatcataaaacctacagcagtcaataataaacgaaccgcaccataatctttgatcagattaatggttttccagcaattcatcagagtcatccttccgtacaaagatggaatacaatctcaaaataatttactctcttcaggagaaaaaatcaatccttttttaaagaaaaaaataaacctggaaagagaagaacagaagagctcggtgaaacatggaaatgtacggtttaacctttcttctccattcattatcagctaaaataagattaaagatagaaagaagtgaaacggatggattcaatggatcagcgtatcgggcgtttagaatattacatacaattgctggtgaaaacggtggatatggataagtaccctttttatgcgatgatgattgaaaaagggctgaccgaagaagaaggagaagaggtcgggcggatctgccgcgaattggaggacgagctggagtcgcaaaaagcgcaaggctttgtgacgtttgacaagctccttgcgctttttgcgggacagctgaacgaaaaattagatgttcatgaaacgatttttgctctgtatgagcaggggctttatacagcgctgatggaagaatttattgagattatgaagcactttgattaactgttgatcggttccagctcttcagccgtttcatggacagccgattcgtccgtttttttcttcagccttccgtcttcactatcaaaatcattgtttatgtttgtcaatgatttctcgaatatctccataaaatcttcgccgtaaatgtggcggatgacacaggttaattcttcaacctcaggaaacttcccgaataagtggtagatcggctgtgagcctttaaacacagcgtttctcgacggatcaaactcctcaagcaggctttcgaatacattttccccttcttctgttaactgaatgtacgtgttccgtttatcattcagccgcttggaaaatttcagatatccccgttcttcaagcttttttgaaaagttaaatgcagttgatacgtgcataacgccgaatttggcgatttctgaaatagaagctcctttaagctgataggcaatccataatatatgatgctcattaatattaaggtcgtacggcttcagccaattctgccagtctttctcgatagatttccacagcgctttggacagctgcgccattttttgggtatagattaaagcttcttttagatcgtaaggcggttcaacacgattcaatacagatcacctgcttcacattttcttttcctctattatgccaataaaataaagattaataaagatgaaaatttaagaattttataataaattcttcatccattgctgggaaaggctttaaaccgcaaaaaaaagtgcggaacgcaatatgtccgcactttttttggttgtataggatattagttttgtaaggttttctccagctgtctgattttctcttcaatatcagcgatttccttctggagatcctgctggtgcggtttgatttcctcctgccaccttttaatgctggtctgaagctctccgcctacgtctttaatgacttctgcgctttctttcgccgtttggacaagctggtccttaagcgccattccgtctttttttaaccgtttgattgtgtcctcaattgaattgcaattcgctttgattttgccccgcagctcttttccggatgaaggagccgagagtaacaccgctgcgcctccgatcaatccgcctacgaaaaggcctgttaaaagggaacgtccgtcagccatttgaaatcaccccgttttttttctcataacttttatcatttttgttcagaagaataaacttctatacatagcttgctttattttagcatattttttaagggaaaaggagggagaaggttgtctgtctttatgattgttttatcttgtatggctcttgtctttgcggcgggcgccgtttattacctgaaactgctcggccaggccgcttcttatccgccgaagcgggtcgtccgccaaaaggccattgtctgctcagcaggaaccgccctcgcattgttccttatctttttcacaaaacttctcgtataaaacatgctgaaacacattaaaaaacctcttccggccggaagaggtttcggtatgcggttatttcaccgtttcaatcatattggaccgttttaagatcgtctgcacaatcggatgcataatgataatggcgatcgtattcagcgcagccgccggaaggacgaccgcgagcaccaatgcggtgaatccgcccggcaggccgacaatcagaagggccagcgccaaaaagagcaaaccggagatgaaggtgccggctatcgtaatgacggcggcgggcgctgttttcacgctctttttcaccaaaagcgccagcgcgagaaacagaaacgccgttaccggtttttcaatgatattcggaagctgtccgcccggaaaagatgtcgtgagtgcggaaatgattcccgttacaatcccaatcatcagcacgttctgcacacgggggaataacagaatacccataaacatcatcacaagcatcatatcgggtttcattccgaataataccggcggcataatggaatgaagcaccgctccgattgccgcaaacagggccataatgactaattcttttgttttcatactaagctctcctctgctaagctttttcgccatccaataatatgctcgtcatttattgcgatggccggaaaaattgatatgcaaacagtatatcaaaggaaccgttatgttagaagaaatttattcgttttcctgctggaactttctcataaactgagccagtttttcacaatcagccaggctgacggcgttgtagatagacgccctgcagcctccgactgagcggtggcctccgagtccggtcattttagccgctttcgcttcttcaacgaattttttcgtgagactgctgtcgcggagggtgaacgtgacgttcatgtgagagcggctgtcttttgcggcatgccccgcgtaaaacccgccgcttgcgtcgattgtgccgtacaggacgtcggccttttcctgattgcgccgttcagccgcttcgacaccgccgttttcagccagccattcaaggacgaggctcagcatataaatcgcaaatgtaggcggcgtattatacagtgaatcggcttttgtgtgagtggagtatttcaacattttagggacgttggcgttttcgttttcaagccatgattttttcatgatgacgaccgtgacgccggacggcccgaggtttttctgggctccgccatagatgacatcaaacgttttgacatcaatttttctgctcaggatgtcgcttgacatgtcggctacgagcgggatcggtgaattcgggaactctttccactgcgttccgaaaatcgtgttgtttgacgtaatatgcaggtaggcgccgtctttgattcctgagaggtccgcttccggtatgtggttgtggtttgaatctgcgcttgttgccgtgacggatgtgtttccgaacagtttcgcctcggcgagtgctttttcagaccatgcgcccgttacgatgaagtgcgccgttttttccggtgttaaaaagttcatcggcagcatggagaattgaaggcttgcgccgccttgaagaaataaaatatcataatcgtcgggaatatccatcagttctttcagaaggctttttgctttttggtgcaccgcatcatattccgtgctccggtgggacagctccatgacggacatgccggtatcattgaagttgacaaattctttttgtgctttttgcagcacatccagtggaagggctgcgggtcctgcattgaaattcgttgtacgttccatgtttacgatctctccctgttttccgctttagtgtaagaaataatacaattatcctatcacaattttttgatttttttgatataaaaaaatataatttatgttttttgtgtttccggacgcaaaaaaacctcatctttaagatgaggcaagccgttttctgacggttgaagcgatctcctgaagatcgtcaggcgtatagtcttcggcgtgggtcttccagacagccccgaaaccgtcgccttttccgtaacgcggaatgatatgcatgtgaaaatggaacaccgattggcccgctttttcaccgttgttattgagaatattcagcccgatcggctcgaattcatcgcggatggcgcgtgcgattttcggcaccgcttcaaaatattctttagaaagctcaggcgtaaactcgtacacgttttcgatatgtgttttcggaatcacgagcgtatggccttttgtgacctggctgatatcaagaaacgccacgacgtgttcattttcgtatacttttgaagacggaatgtcaccggcaatgattttgcagaaaatacaatcgtccgctttgtgcatagatgggtttcctccctgaaaagaaatatatgtatattctcatcgtaccacaaaaacggccaaaacaaaaaacaggatgaacggctgcgcgttcaccctgatgcagaaggtcgagctttatcacagaaaattgaatatgccttttgtaagcacctcatttgtttttaaaatgaagacttatgggtctgcttaatcattcctgggacaaacacctcatttgattatttcatcatgaatgaagaacatcatcaaagcagtgtgtgaagaaattgtaagcacaggacatgttgattttcatccaactgttctaagacgtcttttataaacacctcattttcagttgattaaagctgtttccttctacatacattatgatgtccgccaaaacgataactatgcacccttttcacgtgagaaaaaaagggaatcgtttcaaatcagactttatttttggtactatgaagaaaaacgaatcagaaggggagaaattatgtctctgctatcggtaaaagacttaaccggcggttatacgagaaacccggtcttaaaaaatgtttcattcacccttgagccgaaccagattgtcggactcatcggattaaacggcgcgggaaaaagcacgacgatccggcatattatcggattaatggacccgcataaaggctcgatcgagctgaacggcaagacgttttcggaggataaggaaagctaccgctcgcaatttacgtacatccccgaaacgccggtgctgtatgaagaactgacgctcaaagagcatctggagctgacggccatggcgtacggcctttccaaagaaacgcttgaaaaaaggcttcctccgcttctgaaagaattcagaatggaaaaaaggctgaaatggtttcccgctcacttttccaaagggatgaaacagaaagtcatgatcatgtgcgcgtttctcgcggagccttcgctttatatcattgacgagccgtttctcggccttgacccgcttgcgatcaatgcattgctggagcggatggacgccgcgaaaaaagccggatcaagcgtgctgatgtcaacgcatatcctggctacggcagagcgctactgtgacgctttcattattttacataacggcgaagtgcgggcaagcggcacactggaagaactgagagagcagttcggcatgaaagacgcagctcttgatgacttgtatatcgaactgacgaaggaagacgccggccatgaataatatgtctacgatttggcagtcccggcttgaagagcatataaaggaaaccagaatgtatatgaaatatatgctcaatgatcatctcgtcattgtgctgatcttttttattgccggcgcggcaagctggtacagcaagtgggtcaaagacattcccgttcattttccgtcattttgggtgatggcggtgctcttttcatttgtgctgaccggttcatacgtccggacgctgttaaaggaagcggacctcgtgtttctgctgccgcttgaaccgaaaatggggacatactttaagcattcatttaagtacagctatctgtcacagctgtttccgcttattgctctgtcgcttgtatgcatgcccctgtttttcgctgtaagtccgggggcgtcgcttgcgtcgtatgccgccgtatttattcagatgctggcggtaaaagcgtggaatcaggccatggagtggcggatgacgtttatgaatgacagaagcatgaaaatgatggatgcggtcatacgctttatctgcaatatgctgcttttatacttcgtcttacagtcgttttatgtgtacgctgccgccgtctacattgtgatggccggcctttatgtgtatttcacatcggccgcaaaacataaatcattaaaatgggaagctcatattgaatatgaattaagaaggaagcagcggttttacagaatcgccaatctgtttaccgatgtgcctcacctgaaaaaacaggcaaaacgccgggcgtatctcgactttttgctcagaatgattccgttcgaacagcggaaaacgttctcctatatgtatgcgcgggcctttctgcgttcaaatgattatctcggcattcaggtcaggctcacgattatttttatcctgattattatgctcgtttccgccaatccgtggataacggcggcgttaaccgtatttaccgtctttattacgggaatacagcttctcccgctgttcgggcattttcatcatctttctctgcaggagctttacccggtcaatcagaaagcgaagctgcaaagtttcttttcgctgatgaaatcggcattaaccgtgcaggcgctgctgttctgtgcagcgtcagcctatgccgcgggagtcagcggggcgctgtatgcggctgttgcttcagccgttctgatttttgtgatcatgccttcgtatatgggcggaagattgaaaaagtacggcaagctgtaatcaatcgggtttttgaaacctcaatgaaagaaggagacacagatgaccgacgatcagcagctgatacaggaagcactgcaatggaaagcgcgttttttacgcaaagattctatgcttgaacgtttttctaaaggaatgcaggcgaaaataaatgagcggattcctgataaaattcatgccgtcatcacagaaagcattaaaaaaatgaccgaagcaacaatggcgggttcaaatctggtgaaaggcaagcgggatacaaacggtatgacgcttgctgaaaaagatgccctcgccagacaaaccatcgcatcgtaccaaaaggtcgcggcagccgaaggtatcggtacgggggccggcggaatttttttagggatggctgattttcctttgctgttatccattaaaatgaaatgtctgttcgatcttgcctctatttacggctatgatgtgaaagacagggatgaacgattgtttttgctgtttatttttcagctggctttctcaagcggtgaacagcggaaacgcatatactcaatgattgaacagtgggattcgaaaaagcatgatgtcgattggagagtttttcagcaggaataccgcgattatctggacgtggtgaaattgtttcagcttttgccggtcgtcggagccgccgtgggcggagcggccaattataaactgctgtcacagctcggtgagacggcaaggcacgtttttcatttaagaatcacagcagccggtacgtaatgtaccggctgttttttatgccctatcgggggtagctcaccgcggcgccgataagcactttggcggccgtcagcatcgctttttcattaaaatcaaatttcggatgatgatgaggataaatggtttccgcgttttctaaagcggcgcccgtaaagaaaaatgcgccttttgtatgctgcagataataggaaaaatcctctccggccatctgcggctctccttcaatgactttcgtaacgccgtctgtttccgctgcggcggccgccgcgtgcgccgcttcctcgggatgattgacgacggcgggataaccgcgcttgaaacgatattcataggaagcggagtgcatggaacagattccttttacgacggcttctatttctgcttcgagcaggctgcgcacactttcgtcaaacgagcggacggtgcctgatatgactgcctgatcggcaatcgcattaaacggattttcagcggtgaacgagccggctgagatgacggccggctgcaccggatttacccgccggctgacgatatgctgaagagccgtgacgatttgtgagccgattaaaacggcgtccttcgtatcgtgaggaatcgcgccgtggccgcctttgccgatgacttttatcgtaaagccgtcagcggcggccatcactgcgcccgggcggcataagaccgtcccgacgggttcagtcgcccaaaggtgagtgccgaaaatggcatcgacatgctcgaggcagccatcctcaatcattgattttgctccgccgggagataattcctcggcgtgctggtgaatcatcacaaatgaccctttcagtttttcccggttgcggtacagcacttttccgaccgcgagcagagccgccgtatggccgtcatgcccgcaggcgtgcatgacgccgggaatttgtgaagcatagggcacatctttttcatcctgtatcggcaaagcgtcaaaatcagctctgagtgccacgaccggtcccggttcaccgccttcaatataggctgtgacaccgtttcccccgacattcgtccggatgggaacgccgagcttttcataaaatgaggcgatgaacgccggtgtttttttctccttaaaggatggctcgggattcatgtgaaggtgacgcctgatttcaaccatttcctcatacagcccgtcaagctgagcgtttaagcttttttgaagtgtcgttaacgtcaaaagcgatgccccctcgtctgcttttcccatgattgtatagaaaatgtcagaagatttcaatccttttgctacgggagaatgatgatggcggcgatcgttgtgacgactagcccggccgcaaccgggataaagtttttcctggcaagctcaaacggatcaactttacaaatagccgcagcggggatcagtgcccaagggaccaatgttccgcccccgacccagatcgctgaaatctggcccagcgccgttaaaacggccgggtccgtatgaagcgcggcggaaaacagctttgccatcgagcctgcaagagatataccggaaaaccctgacccgtcgagcccggtaatcgcaccgactgcggccagggcgatgccggcgaattctccggacatcggaaaagaatgggacagggccaatccgaggtcattgacgatccccgcagatcctttcggcagcggggtgttcaaaatacttttaaaccccgcgtcaccgagataaaagaaggccgcgatcggaatgacggggccgaatactttaaagccgaattgaaaaccgccgataaaatactcggtgatcttttctaaatgccgctctttatatacaatgaaatgaatgatcaggagaatgccgatcgcggttcctccgacgagtgccgtcgcatcgtttccttgcagacggtatacgatcatacagataatatcggcgagaaaaacaagcggaatgaaaaccgccaggaccaccctgagttttttcggcagatacatacttgtgtccaaagaaccggagctgtccaaggagaggggggtcttcgttttttttcgatcccgcatgatgaggatgaaagcggtgattgtcgtcgttaaccccatgatcaaaacgagcggaatacttgcctgcatgacatcgctcacgggaatgcccgcggcatcggccgttaatttcggggccgcctgaatgacgtaatcccccgataaagcgaatccgtggccgaacaggttcatcgccattgccgcggcgatcggagaaaggcccgcccggatcgctgcgggaagcagcacagcgccgatcagcgccacccctggggacggccagaaaaaaagagagatggcaaacatcagacagccgataacccaataagcgacagccggccctttcatcagctttgcaaacggagaaatcatcgcttcattaataccggtttcggtcaaaaggccgctcatcgccacgataaaacaaatgataaaaatcgtcggcagcaattctccggcggcatacgtgaagctgtgaaacaggctgctgaccgaagcggagaatgaatgcgtcgtccatagcgcaatcacaaaaatgccggcgagtgaaataaaggttgtatctttcctgaggagcataaaaacgataatggccgcgataaaagcaacataaagcagatgtaccgagtagacgccgatccccaattgaaccactccgtttataaataggattgctacaggttattcataggcgggcggaaggtgcaaagaacgaagcgtaaaatcgggacattaaaaaagccggagaatctccggcggttttcagtctattgcgtaataagcggttacataagacgggcgggaaaaaatagacatcgtgtcgatgccggcagatgttccgcgttttttatgggcttcctgataagagtttgactgctgccagccctgaaaggctttttcctcttcccacagggtcaaaatgacatacgtatcgccttcgagcggtcttaatacgcggatggcttgaaaaccgggttcattttccactttgccggcgcggtttttaaaccggttttcaaacagcggacggccttcctgggtaacggcgatgttgttgaggacggcgtagcccggctttttgatttccccgacgctgtcgatgctttcataggaatggggcgcctgaaaaacggtttctccatttgtttcatgaattaaaaccgcattatcctccccttgcatcagcaccatattctcgctcgggtgtttctttgcaatcgtctttaaaaaatcggctgtcccgtatgtaatataaaccttcatatcagccacctcctgcttgctagtatatcaaaagagtggtataagtttctattggcgactcattctgacataattcgaaacaatatttcccatactacaagttaagaaaggcgaggtgacttatgctgaaaaagaaaaaaagattctttattccggctgtaattgcggcggcaaccgcttttctcgcgttaatcggatacattatcattatatttctcggccattatgtcatcgatgaaaagaaattaatactgcacgcatcttcaaaaatcgtcgatcaaaacggtgatgaaatcgcgagcctctatacggaaaatcgcgagccggtatccattcagcaggttccggaagatgtgagagatgcctttatcgccgttgaagataaacggttttacgaacatcacggcattgatgtgaagtctgtcggccgggcggtgttccgggatgttttagcaggcggcaaggtggagggcggcagcacgatcacccagcagctggcgaaaaacatttttctgactcatgataaaacatttttgcgcaagacgaaggaagtcattatcgccatcaatcttgagcgtgattacagcaaggacaagctgcttgaaatgtacctgaaccagctttatttcggccatggcgtttacggcattcaagccgcgtcccactactattttaataaagaagtaaaagatttaaccgttgcggaaggagccgttctggcagcgattccgaaggcgccatctctttattcgccgattcagcatccggataaaaataaagaacgccgcgatacgattcttgcaatgatgaacgaccaaggctatatcagcgccaaggaagccgtcagagcccagggccggacattggggcttcatgtcaagaaaacatcagaaacgccttggtttgacagttatatcgatcttgtcatcaaggaggcggaatcccgttattcgatgtcgggtgaacagctgcttcaaggcggctatacgatccggacgtcacttgattccaagctgcagaaaacggcatacaccctcatgaaggaaagcggctattttccggggacggatcaggcggcagagggaagcgccgtctttattgataataaaaccggaggcgtgcgcgcggcggtcggcggacgcgactacgtgacaaaaggatacaacagggttacggcgaagcggcagccgggctcaacgtttaagccgattgccgtatacgggcccgccatgcaggaagacaagttcaaaccgtattcgcttctccaagacaaactgacgtcctacgacgggtatgaaccgaaaaattatgacggacagtacaagggggaagtgacgatgcaggatgcgatcacttacagcataaatgcgcccgctgtctggacattgaagcagatcggcgtggatacgggaaaatcgtatcttgagaaaaacggcatgaacatttctgacaacggactcgcgattgcgcttggcggtctgtcagaaggcgtcaccccgcttcagcttgccggagcttatcatacctttgcggcaaacggaatgtatacgaagccattttttatagagaacatcacggacgaagacggagaaacgttatccgggcctaaaaacggcaaaacgcgcgtcttcagcggacagacggcatggaatatgacgagaatgcttcagcaggtcgtaaaagaaggaaccgcttcacaaggcagctatcaaggtgacctggcggggaaaaccggcacgaccacatttcccggcgtccccggcgcgacaaaggacgcctggtttgcgggatacactcccggactgacgggagccgtctggatgggctatgacaaaacggataaaacccattacctgaaaggcggaagccaatacccggtcagactctttaaagatatcgtcacaaaagcgggggaaaacggccggacattcaaaaagcctgaaaatgtgaaggaactgggcagcccgattgagctggaggcggtaaagtccctgtcggcccgttatacatttaaggcgatgggactgattacggttcaattaaaatgggatattcaaaaggatgatcgggttgtttaccgaatatatgagaagaaagacggaaaagacaaacttctggattcggtgaaaggaaaaggcagctttgacataccgtacgccaatctgttttcaggggcttcatacaaagtcgttccatataattcacagacggatcaagaaggagagggaacggaatacgttcagccgaagcttttttcttcttaatcatgaattcggcgattttttgaacattgagcctcaattctatacgcttttgaaaaaacaaggtatagtgtaatgggcgaagaacacgaacgtatggttgcaggaggaaaggtggaaattcagatgagtaaacgagaagcgtttaatgatacgtttttaaaagcggcacggggagaaaaaacaaatcacgtccctgtctggtacatgagacaggcggggaggtctcagccggaataccgcaagctgaaggaaaagtacggcttagtcgaaattacgcatcagcccgagctgtgcgcgtatgtgacgaggcttccggtcgagcagtacggagtggacgctgccattttatataaagacattatgacgccgcttccttatatcggagtggatgttgaaataaaaaacggaatcggcccggtgatcgatcagccggtgcgctctgctgcggatattgaaaagctcggcgaactgaatcccgaacaggatgttccttacgtgctggaaacgatccgattactcgtaaacgaacagctgaatgttccgctcatcggtttttcgggagcgccttttacgctggccagttatatgattgaaggcgggccttctaaaaattacaacaaaacaaaagcgtttatgcacagtatgccgcaagcgtggcaaatgctgatggacaagctcgcggacatgattatcgtttatgcgaaagcgcagattaacgccggcgcaaaagccattcagatttttgattcatgggtcggcgcgctgaaccgcgaagattaccggcagtttataaaaccggtgatggacagaatattccgggagctttcagcagaacaagttccgctgatcatgttcggcgtaggcgcaagccatctggccggggattggcatgaccttcctcttgatgtcgtcggtcttgattggagactcggcatagatgacgccagaaaacaaggcattacaaaaacggttcagggcaatcttgatccgtcgcttcttcttgcgccttgggaagtcatcgagaaaaaagcgaaagcgatacttgatcaaggcatgaaaacggacgggtttattttcaatttagggcacggtgtattccctgatgtcaatccggcaacgctgaaaaagctgacggcgtttgtacatgaatactccgcggccaaaaaaacggaacgatcttcctgagcagatcgttggttataagaagattttcctgtcaaaatcaaggtggacagaccatcaaaagaggtgtttaacaaaatgagcagcaaaaagaaaatgggacttcttgtcatggcttacggaacgccttacaaagaagaggacatagaacgttattatacgcatatcagacgcggaagaaagccggagcctcatatgcttcaagatttaaaagacagatatgaagcgatcggaggcatttcgccgcttgcaaaaattacgcaggagcaggcggagaagctcgcacagcgtttaaatgaaatccaggatgacgtaacattcaaagtgtacatcggattaaaacatattgaaccgtttattgaagacgcggtggcggacatgcataaagacggcattacagaagctgtcagccttgtgctcgcccctcatttttcaacattcagcgtccagtcatacaacaaacgcgcgaaagaagaagcggagaagctcggcggcttgaccatcaagtctgttgaaagctggtatgatgaaccgaaattcgttgattattgggtcagccaggtgaagaaaacgtatgaatcaatgccgaaagaagaacgggatgacgcgatgctgatcgtctcagcgcacagccttcctgaaaaaataaaagaatacggcgatccgtatcctgaccagctggaggaatccgcaaaactgattgccgaaggcgccggaattaccgattacgcagtcggctggcaaagcgaagggaatacccctgatccgtggctcgggccggatgtgcaggatctcacgcgcgatctgtaccaaaagcatccttataaagcatttgtatacgtgcccgcaggcttcgttgccgatcatttagaggtgctttacgataatgattatgaatgcaaagctgtgaccgaagaagtcggcgcaagctactatcgtccggctatgccgaacgcacagcctgaatttatcgacgcgcttgcagcggtcgtgctgaaagagctggacaagtagaattaaacggtaaagaaggcgataaaaatgagtggcgataaaaaacatctggtcatcatcggcggcggcataacgggattagccgccgccttctacatggaaaaagaaatcaaagaaaaacagctgccgcttgaggtcactctgattgaagcgggcccgagagcgggcggcaaaattcagacggcgcataaagacggctacatcattgagcgggggccggattcttttttggaaaggaaaaaaagcgcgccgcagctcgtcaaagatttggggcttgagcatctgctcgtcaacaatgcgaccggccagtcttacgtgctcgtcaacgagacgctccatccgatgccgaagggcgcggtgatgggcattccgaccaaaatcgctccgttcatctccaccggtttattttctgttcccggaaaggcgcgggcggcgcttgactttgtcctgcctgcgagcaaaccgaaggaagatcagtctctgggtgaatttttccgcagacgcgtcggtgacgaagtcgttgagaatttaatagaaccgctattatcagggatttatgccggagatattgataagctgagcctcatgtccacgtttccgcaattctatcagactgagcagaagcacagaagcctgattctcggtatgaaaaaatcacgtccgcagccttcgggacagcagctgacggccaaaaagcagggccagtttttaacgctgacgacagggcttcaaacgttggtggaggagctggaaaagcagcttacgctgacaaaggtgatgaaaggaacgaaagtcacccatatcggccgcgaggagaaaggatattccgtgacgcttgataacggcaaagtgctctatgcggaaggatgcatagtaacagccccgcataaagccgcggcgaaaatgctttctgatctgccggcggtttcatgtcttaaagacatgcattctacgtccgttgccaacgtcgccttaggttttcctgagggagccgtcaagatggagcatgaaggtacgggattcgttatctcaagaaacagcgacttctccatcacggcctgcacatggacgaataaaaaatggccgcacgcggcgccggagggcaaaacgcttctcagagcgtacgtcggaaaggccggagatgaatccatcgtagatctttcagataacgagatcattaaaatcgtaatggaagatttgaaaaaagtaatgaaaataaatggcgaaccggaaatgacctgtgtgacccgctggaacgaaagcatgccgcaataccatgtcggccataaggagcgcatcaaagagttcagagatgcgctgaaagcttcctatccgggcgtatacgcgacgggcgcgtctttcgaaggggtgggcatccccgactgtatcgaccagggaaaagccgccgtatacgattcactggcttatttatttgaaacgtaccagcctccgttatcgtaaaacggaggtttttttgcatgttcccgttctgtaaagggaacaccaataaagagagaaaacatttgaatcttctttgtgactgtgataagttatcttatgtacaaaatgactaaaacgttcaaacggtcaatttaacgaggtgggaaacatgtccgtcgatcggaaaaagctcattctggaagcggcaacgaagtcttttacacaattcggctacaaagcaacgacaatggatctggtggcaaagcttgcaaatgtggggaagggaaccatctacacgtttttcaaaaacaaagaagaactgtttgatgatattttcaccactattttaagagaaatgaaggaacacgcagacgaagcgatgaaaccggagctttcatttcacgaaaatgtccaccgggcgcttgtcgcgattttggaattcagaaaaacacaccagctgactattaaaatttttcaggagaacgccgagattggtacaatagccgttcaggatgtcattgcgaaaatggagcgggccattctgtcatacattaaagaaaagatagaaacagccattgaaaacggaagcattaaaccgtgtgatccggaactgaccgcttttgtgatgctcaagctctacatcgcgctgatatttgactgggaaaaaaaccatccgcctcttgaaaaagagacgatcgccgaattgctggaaatgtatgttggtcaaggattatctaaataatagatgatccttcactttttaggtgccgtgaccgttttgtcaaatgagtcagtttgcggaaggaggcaacagggttgaatacaataaaaagccagtggaaagacattgtaacgaacaagaaactgttaatccccatcattgccatattattcgttccgctgatttacagcggagtgtttttgaaggcgtactgggacccgtacggcacggtggatcagctgccggttgtcgttgtcaaccaggataaaggggcggactacgaagggaaacatcttcagatcggtgacgaccttgtgaaagagttaaagaaaaatgataattttgattggcatttttcaagcgatcttgatcaatcgttaaaggacttattaaatgctaaatattatttattggtcgagattcctgaagatttttctaaaaacgccagcacggtaatggataaaaatccgaagaagctggatctgaaatatcatacgaatgccggatcaaactatgtcggcgcgacaatcggggaaaaggcgatcgacaaactgaaagcctccgtgtcgaaagaagtgacagagcaatacgcaaaagtcatttttgataactttaaagatattgccaaagggctcggcaaagccagcagcggagccaagaaaatagacgacggcacgaaaaacgcgaaagacggcagcgccaagctgaaggaaaatttagcgaagcttactgaaagcaccgccaccatcggcgataaaacacagcagcttgcagacggcgcggcgaaagtgacaagcggaattcaaacgcttgacagctctatcgcaaaacttcagagcgcaagcgccgaaattcaagataaatcaggacagattgcttcaggaggaggccaagtggccagcgggctgaaaacaagccttgacgcacaaaagcagctccagcaaaagcttccggatttaacgaatggattaagcgcgttaaacagcaaggcgcaggaagtgtcgcaaaaagcggcggcatttgaagatgcgatcaattcagtcaacctgtcagacattgaaaacgcggttgggcagctcgaacagactgaaaaggacctgcagcagtttaagaagaagctttctgatctgaaaaacagcctggatgcccgggatgacgcggtcaaaaaggtgattaaggacagtgatttcttaacggatgagcaaaaagcgaaacttgttcagcttctgaatgagaagcttccgaaggctgaccttccggatttagacaatatcgtcagccagcttccgtccggcggagatattcagcttccggatatgtcagtcataaaaagcgcgctcaaagatgtaaaagcgaaggctgatcagctgaaagcactgcctcagtccacatcgaaactgtataacggcgcagcggcggtacaagacgcgattaaccagctgacagcgggaactgataaattatacagcggagcgcagaccgtttttgaaagccaaaacaaactgacggccggcatcggcgaatacaacagcaagttcggacagctcaaatcaggatcagaagcgttagtgtcagggagcggccaagtgtcaggcggcttaacgaaactgctggacgcgcaaaacaaaatccatgacggctcgtccaaaattgagcagggtcaagcgtctctcggcaccggtttaagcaagcttttagacggcaccggacaattgtccagccagctgaaagatgcggctgatcaaaccggggacattaagacagatgacaaaacgtacagcatgtttgccgatccggtaaaaacggacgataacgcgattcattccgtgcctaactacggtaccggactgacgccttatattctctctatgggcttgtatgtcggcggattgatgctgacggtcgtattccctctgagtgaagcttcagggcgtccgagaaacggttttgaatggttcctcagcaaattcagtgttattcttcttgtcggactgattcaatccgttattgtcgccacggttctgttaaaaggaatcgggcttgatgtggaaagcacgtggagattctatctctttacgatgattaccagcatcgcgttcctgtccatgattcaattattggcgacaacgatggggaatccgggacgctttatcgctgtcatcattctggtgctccagctcggggcaagcggaggaaccttcccgcttgaactcctgccgggattctatcaagtgattcacggggcactgccgatgacttacagcatcaacgggttccgcgccgtcatttcaaatggcgattacggctatatgtggcagcaggcatccattctgttgggcatcgccgttgtcatgatcgcgctgaccatcgtgtattttacggtgcaaagcaaaaaagaacacaaaacggaagaagaaataacagcataagaaaaagaggctctgagcagatgctcagggcctcttttttttagatttcgatcgtcgtacttttaaaatccccatctcaccaacagtccggtatacgtcaatcctccgccgaacccgaataataccagcgtctggccttccgacagtttttttgctttcacagcttcatccaatgcgagaataatagaaaccgatgaagtgttgccgtaatattcaacgcttgtcaacgtccgttcaagcgggaagggcagtttttcgcagatggattcgatcatccgcatgttggcgctgtgaggaacgaaccaatccagatcgtcttttgaaaagccggctttttctaaaagggcattgcattcctcaggcacggttctggccgcccatttatatacttcgcgcccgttttgcaccatgtttcctccgcctttaagcggctcgccgtttaattctgtgctcagtcccgtgcgatacagcacgtccgcgcttcctcccgctgttccttgcacggctgccaaaaagcccggcgctgattcatcgcgttccaccaatagggcgccagcagcgtctccgaaaagaacgcaggtcgtccggtcagtataatccgttacctttgataatgtttcaccggcaatgacaatcactttttgatgggaaccggcggtaattaatgcgtctgcgagctgaaggccgtaagtgagtccggcgcatgtggcgttaatatcaagcgcccccgtgtgcggccagccgaagtaagcctgcacgcgtgccgcggtgcttggaaacgcatagtccgccgtcgttgtggcgacaaggatcatatcgacatcatcaagagttccgctgtatcgttctgcaagatttttcaccgcttccacacacaaatccgatgtgaattcatgttcgccggcaatgcgtctttccttcataccggtgcgctggacgatccattcatcagatgtatcgacgatgcgctccaaatccgcgtttgttaatcggcgtgccggagcatatgtaccgattgctgtaattttagattttgacatgaaaaatcactcctttatatcagattataacacctgatattattacttggtactaattttaataaaaaaacccaagcagcatccgctgtttggggagcatgagatatctatttgtaaaacgggcttgtgtgaacgattaccaatgacggcagcagcggcggcatgaatgatgatgcttctttttatctttcttctttttttctttcttctttttacaagggtcttcttttttctttttacagtgatctttttcttttttacagccccagaaggctgcaccagaccaatcatcctcaaaccaatcctcaaaccaatcattatgaaaccttttccgcttgtgcggtttacggctgatcatacatttccctcctatgctcatgctcccttcattctatgaaaaaagagaaggaaaagattggacgggttatggatcaaaagagtatattttaagaagaataaaattgataggaggaatgacctgtggcaaatatgaaacatacgatggaactgattaaagaattggtgtcgattccgagtccgacgggcaatacatacgaggttatcgcctatacagaaagtcttttaaaagaatggggcgtctcctcttacagaaaccgcaaaggcggtctttttgtcacaattcccggccgtgatgacaagaaacacagattgctgacggcgcatgtcgatacgctcggcgcgatggtaaaggagataaaggcggacggccggctgaagattgacttgatcggcggcttccgatatcactcgattgaaggggaatattgcgagatccaaacttcttccggcaaaacctatacaggcaccatcttaatgcatcagacttcagtgcacgtctacaaggacgccggcaaggcagagcggaatcaggagaatatggaagtccgccttgatgagcctgtccggacgaaggaagagacgtccgatctcggcatcagggtcggcgatttcatctcatttgacccgcgcgtgcagattacgccgagcggctttattaagtcccggcatcttgatgacaaagcgagcgtggctctgctcttgaatttaatccgccgcatcacggaagagaaaatcgaacttccgtatacgacgcattttctgatttctaataatgaagaaatcggctacggaggcaattccaacattcctcctgagaccgtcgaatacttggctgttgatatgggggcgatcggcgacggccagtctacggatgaatataccgtctccatttgcgtgaaggatgcgagcggcccgtaccattatcagctcagaaaacatctggccgggcttgcggagcgctatggcattgattatcagcttgatatttatccgtattacggttctgatgcctcagcagccatccgttcgggccatgacatcgtccatgggctgatcggcccgggaattgacgcttcacacgcttttgaacgcacgcatgaattatcgcttcttaatacggcgaagcttttgcaccggtacgttttatcgccgatggcataaaaaaccctgcgcggaaatcattccgtgcagggttttcattttaacctgagatggttgtgttttgttctgttttggcgaggctcatgaccttcgcgcctttaacgggatcatactggccttcccattttgacatcacaacggatgccagcgcgtttccggtcagattgacgaccgtacgggccatgtccataatccggtcaacaccggcgatgaatgcaaggccttctgcaggaatgttgaatgcgcctaatgtcgcaagcaggacgacgaaagaagtcccgggcacggcagccattcctttggaagtgaccatcaagacaagcacaagggtaatctgctgccaaatggacaagtcaatgtggtatacctgagcgaggaataaagcggcgatagattggtacagcacagatccgtctaagttaaaggtatatccgatcggcacaacaaaggaaacaatacctttcggacagccgattttctccattttttccataacgcgggggagtacggtttcggagcttgacgtactgaacgctaataaaatttcatccttcatataggcgaggaatttgaaaatgtttactccggcaagctttccgacgattccgaatacaacaatgagaaagaaagccaaagctacatatactaaaccgaccagtttaccgagtgaaagcagggaactgagcccaaatttggaaacggtaacaccaatcaacgcaaaaacaccaaacggcgcaactttcatgacgaggttcacaacatggaacatcgcatgagaaacaccttcaaagaaggccaagacaggctttcctttttcaccgattgccgagatgccgagtgcaaacagcacggtaaagcagatgatggcaagcagatctccttcggctaatgattggaagaagtttgtcggtacgatatgcaggaatgtgtctgcgatagatttgttattttgttctttttctgtttcaacatattgactgatatctgttttttgagcttcatgtatattaacgcctgttcctggatgaaacagattcgccaaagccagcccgagaataatggcaaaagtggtaatgatctcaaaatacaaaatcgttttgaagcctaattttccgacttgttttccgcttcccgcgccggcaacgccgatgattaagctggagacgacaattggaatcactatcattttgattaagcgtaaaaacaaatcgccgataggctgtaaatatgttggaatggcgggattgccgtaccagatgacaccgactacaacccctagtatgagtccgacgaaaatttgcgtcgctagtccaaagcgtaattttttcatagattacctcccgaagaaaaaagtgcaataagtatctaaaaagatagctattagaacaaattataatagaaaagaaaacaatccgtctatagaaaaatatagattgaatatactgaatcttttaaaacgtacagataattgctaataatggtgaataacgccctattcagaaagtatgatgacggccgaaaaaacgggcgccgcacaacttagaattgtgcggcgccctattgtcacatatccttaattttcaagcagtcattgcacagattaatgtgacactcatactgctcaacaatctcatttccgcattcttcgcatttcttaccgggtaaatttctgaaaaaatccgacatcttttccaacatacccatccctctttcattgttttgtctctacattgtattataacagtttgagaaaatcaacggctgttttgacacaatgtttaaaacatgcaatttgtacgaaaaataggtatattggaggaaaggatctttttatcataaacattggaggatcatatgaaagttacagttattgggtgctgcggcgggtttccggccgcaaacgaagcaacttcaggctatctgtttcagtccggcggctattctctgctcgtcgattgcggaagcgccgtattatcaaagctgtttgcctatgttccggcagaagagcttgatgccgtcattttgtcccattatcaccatgatcatatcgctgatatcgggccgcttcaatttgccaaacaggtcggctcctttctcggaaaagggacgcatgcactgccgatttacgggcatgatgctgatatagaacagtttgagcgtcttacatataaaacccatacaaaaggagtggcctatcagccggaccgcccgctttctctaggtccgttcaccattaccttcctgaaaacggtgcatccggtcacttgttatgcgatgcggattactgacggttcagcttctgttgtgtatacggctgattcaagctaccaggacgcgtttatcccgtttgcggaaaatgccgatctgctgatctgcgagtgcaatttttacgcggaccaggacggcacgtcagccggccatatgaacagtttggaagccggacggatcgcgaaggaggccggagcgggggagctgattctcacgcatctgcctcatttcggcgagcaccggaagctgaaagaagaagcggaatccgagttcgggggcgaagtgacaatcgccgcttccggattgaagtgggagaaataaaggaggagcaccatgttatttatcgacaaccaaaacataaccgacccgaggatcaacctcgcgattgaggaatattgcgtgaagcatctcgaccctgaacagacatacctgctgttttatgtcaatcagccgtcgattatcattgggaagaaccaaaacacaatagaagaaatcaatacgaaatacgtagaagataacggaatcatcgtcgtccgcaggctgtcaggaggcggcgcggtttaccatgacctcgggaatctgaatttcagttttatcactaaggatgacggcgacagctttcacaattttaaaaaattcaccgaacccgttattcaggcgctgcgccagctcggtgtggaagctgaattaagcggccgaaacgacatcgtcgcggacggcagaaaaatttccggcaacgctcaattttcgacgaaagggcgtattttcagccacggaacattaatgctggattccgccattgatcatgttgtgtcagccttgaaagtgaaaaaagacaaaatcgaatcaaaaggcattaagtcgatcagaagccgtgtcgccaacatcagcgagtttcttgatgacaaaatgacggcggatgaattcaaaaagcacctgcttcaccatatttttaatacaaatgatctttccgaagtgccggaatataaactgaccgatgaagactggaaagcgatccggaagatttccgaagagcgctatcaaaactgggactggaatttcggaaggtcgcccgcatttaatcttcagcattcgaaacgttatccggtcggatcgattgatctgcgtcttgaagtgaaaaaaggaatcattcaggactgcaaaattttcggtgatttcttcggtgcgaaagatgtgagtgaagtcgaacaggcgctgaccggaaaacagtatgaccgaaccgctatcaaggaggcgctggccggaatcgatctgaaacagtatttcggcaaaatagagctggaagatttcctcgagctgatttattagaacatttgccgaacgcatgatttgaatcagcgcccgtttttgtgaaatgatagaaccataatgaatggggagggatcatgatgaaagtatttctcatcggagcaaacggacagatcggacagcggctgaccgggctgtttcaaaaagacggcacgcatacgctgcgggcgatggtccggaaacaagagcagaaagaagcgcttcaagccgcgggaacagaagccgttcttgcagatttggaaggaagcccggaagacatcgcgaaagccgctgaaggctgtgacgcgattgtgtttaccgccggatcaggaggaagcaccggatacgataagacgcttttgattgatcttgacggagccgcgaaagcgatagaagcggcaaagatagcaggcatcaagcggttcattatggtaagcgcccttcaggctcataaccgcggcaattggaatgaagcgctgaagccgtattacgccgcaaagcattatgcggataaaattcttgaagcgagcggtctgacgtatacgattatccggccgggcgggttattaaatgatcccagcacgggaaatatcaaagccgcggccgatttggaaagaggttccatttcaagagacgatgtcgccaagaccgttatcgcatcccttgatgaaccgaatacgtatgaaaaagcattcgatctgacggcgggcggcacgccggtcagtgaagcgctgaaacaattatagtttccggttttacggcactcggggctttttgcccttgagtgtttttctatatttttctataataaaagtgaacgtttattccggataaatgaatgactattcattcattacaatttttaaaggggtgggaaaatgaatctggtttccaaattggaagaaacggcatcgcagaaaccggaaaaaccagcttgtctgtttcaagatcagtacatgacgtatgaggagctggcaggtaaaatcaaagcatttgcaaacggcttggaggacaggggactgaaaaaaggggatcatctcgcgctgctgctcggaaatacgcctgattttgttattgcgtttttcggcgcgttaaaagcgggaattgtcgtcatacctgttaatccggcatatacaccttcagaaatcgcatacatgctgaaaaacggcgatgtcaaagcgatcgccggcatcgaccttttaattcccgtatttgaaagcctgcacggctcgctgccgctgctggagcatatcattatcagccagacagcagagaacgctccatcgacagaagaccctcaattgcgcttaaaaatgacaacgtttacaaaaatgcttcgcccggcggagcgcagcagaacttatccgacattgtccaaagatgatactgccgtcattttatacacctcagggacgaccggaaaaccgaaaggcgccatgctcacccatcagaatcttttctccaatgcaaatgatgtcgccggatacttaggaatgaatgagaaagacaaaattgtggcggcattgccgatgtttcacgttttttgtttaaccgtctgtatgaatgcgcctctgatgagcggagcgtgtgtcttaatcgagccgcaattcagcccggcttctgtgtttaaactgattaaaagccgtcaggcaaccatttttgccggcgttccgacgatgtataactatctgtatcaatacgagcacggcaaggcggaggattttgcgtccgtcagactgtgcatttcaggcggggcctccatgccggtcgctctgttgcagacatttgaacaaacctttgacgtcaccattctggaggggtacggactttctgaagcgtctccggttacttgttttaatccgtttgaccgggggagaaagcccggctcaatcgggacgaatattttacatgtcgaaaataaagtcgtcgatacgctcggacgcgaattgcccgaccatcaagtgggagaattgatcgtgaaagggccgaatgtgatgaaaggctattacaagatgcccgaggagacggagcacgcgctgaaagacggctggctgtacacgggtgatttggcgaagcgcgatgaagacggttatttttatatcgtcgacagaaaaaaagatatgattctcgtcggcggatacaacgtctatccgcgcgaagtagaagaagtgctctacagccatgagggcattaaagaagccgtggtcatcggcgttcctgacgccaaaacgggggaagcggtgcatgcttatatagtgccgggggacggtgagctgacagagcaggcggtttttgattactgtgaaacacatttggcaaaatataaacggccggcggaagtggtttttcttgatgagattccgaagaacgcgaccgggaagctgctgaggcgggcggtccgggacatgcttccgaaatgacggacgaaaagcgaagccgggggcttcgcttttacatgctgatccggtcagctctgcgattcttccttaatgatgctttgcacaagcttcgtatcatgccgggtcagtttgtaatacgtgtttttatacttgtacatcatataattgccgctttcgagccacatgctgaatgaatcaaaacggtcttcatggtatttgaccgttccgtcgtaatcgggagatacgcttttggtcagtttgacttgttttccttggttcaagatatcgagcatatcttttacattctgcctgtctttaattttgatttctttttttccgtgctcagacagaataatcagatctgcgttgcttgatggaaacacatcgccggtccggctgtatacatagaagaaagcaataaccaaaagggcgattactacaataaacgcgattatttttttcatattcatcactccgtcttttagtctttcccgcttcctgttgttccattcttttctgttgtgaaaagattaacatccgtttcggaggcttggttctatttatttgcatttatgcttacaataggagtaagtcatcaggctaaggagggagacttccatgcgcaaatggatagcggcagcgggacttgcctatgtgctgtacggcctttttttctattggtatttctttatgacaggcgactccgccgtcccggaggccgtaaagggaacgaaagccgatccgtcctcgtttatggacccgggccgcctggaagccgctgaaaacttttcaaatgtaaaggattttttatttttcatcggtgcgccgttagattggtttttattttttctgctgctcattacggggcttgccaaaaaaataaagcattggctggaagcagcggtgcgctttcgggtgctgcaaatcgtaagcttcgtatttgtgatttcactcatcgtaacggcggcttcgcttccgcttgaatggatcggatatcgggtttcgcttgcgtatcatatttcgacgcagacagcagcaagctggataagagaccatgtcattgatttctggatcagttttccgctgtttgccgtgtgtgtgcttgtgttttactggctgatcacaaagcatacaaaaaaatggtggttttacgcttggtgtcttactgtgccgtttaccctgtttttgtttttcctgcagccggtcgtgattgatcctttatacaatgatttctatccgctgaaagacaaggagctggaaagcaaaatcttgtcgcttgccgacaaggccgatattccggccagccatgtttatgaagtaaatatgtcggagaaaacgaatgcgctgaatgcgtatgtgacgggaatcggttcgaataagcgaatcgttttgtgggatacgacgcttaacaaactgaaggatcgggaaattttgttcattatggggcatgagatggggcactatgtgatgaagcacgtgtacatcggactggccgggtatctcctgctgtcattagccgggttctatatcattgacaagctttataagcggctgtccaaattcttcggccgaatgcttcatataaaggggcctgaagatctggcggccctcccgctgttattgctgctcatatccgttctcagttttgcttctgatccgattacgaatgccgtctcccggtatcaggaaaacgccgccgaccgctacggcattgagctgaccggaaaccgggaagcggcgattgagacgtttcaggacttggccgatacgggactgagccgggtcaacccgccgtttctcgtcaaaattttcagagggagccacccgtcgatcatggagcggattgaacatgcggaggaagaaaaataataaaaaaaccggcggggccgtggccgacgccggtttttttatgttttactgagctgccgcctgtacgttgatcagcccttttccgtagtagaaagcatcaccaagttttgtagtggtgttttctaaactgctgcggacttgagtgtttgtccagttcgggtgcttagaaagaatcaaagcagccgctccggcaacgtgcggagatgccattgacgtaccattgtacgcgccgtatttgtttccaggaagcgtgctttggatagagacgcctggtgccatgacatcaagctcagaacctacgcttgagaaagatgctctttggttgctgctgttaacagcgcctactgcaatgacagaagggtatttaccagggtagcccactgtgcttgagccgccggaagtgccttcgttaccggctgccgctacgactacgacgccggaagcaacggctttgtcaactgccgcttttaacgctgcagaaccagaaggtccgccgaggctcatgttaataacgtccatattgtttgcgatcgcccactcaattccgttaatgatccagctgtactggccggaaccgtcagcgccgagaacttttacagcgtaaagagatgcgcttggcgcaacgcctaatacaccgactgagttattaagagccgcaactgtaccggcaacgtgagttccatgagagttgtagtcttggaaaggatttgtttcagaaggaaccatgctggctccgcctgctacttttaaatcaggatgagaagaatcgataccgctgtcgataaccgctactttcacatttgatccagtgaagccttgagagtgcagagcaggggctttaatttgtgatacgccgtaaggcacggactgcgcgtacgcttttgcaacgtgatcttcttcaacgtaagcgacgcttgggtcttttttcagctcttttacagctttttcatttaatgtagctgaagctgcgtctacatatttgaattgcttttgcactttcccgcctttttcagaaatgacatcttttttcttagcggcgctcatcgtgctcattgtctgcttaaatccgacaatgtatttcttttccccgtttgatttccctgccgcctgggcaggagacgtgctgccgaacgccatcgtaaagattaacgctaaagcaaacagcaaactgatccatacctttttgcctctcactctttatcctctcctttttttcatttgcagaacaaccaatagacagattattctgtggattaattgtatagcatggaataatattttagtagacccaatttttttcaatttgttttatttctatttaggtatatcatctctctttcgtttaataggaacccgaaatatttaaattttaatggaaaaaaccgatggaaggacatgagtatttgtacacagccgcaatcgctctcttgtttgctgggtcgaacggtttgattccatttttggaagctgcggcaaaaacaggataaatgtcaccttttgttgaatgcagaagtctgatggaaacggaagcggaatgaaataaagcggccggcatgaatcagtcttcggctttcttgacggagaaaagctgtgaaaccattttataaaaataatgataatgaatatcattgatacttatattgtcaatgatataattgcggaaaaacgaaagagggggaacagatgaaacaaatgctcagtatgctgatgatcttatccgttctcttcataacggcatgctcagaacaggaacatgaaaccgccgtcaggcacgatctggggacggcgcatgtggctgcgcacccgcagcgcatcgccgtattgaatgagggctttattgataccctccatgatctcggcataaagccggcggccgcggcggataaccggacagagcgaaaagacggcagtccgtctgtcggaccaccgtcacaccctgatttgaaaaagatcacttcgttaaagcccgatctcatcattgcagactcaagccttcacagggggatataccgaaaactgacaaagatcgctccgacaatcgctttaaaaaatgaagctgcggattatcaggatgcggttgacgctgcccttactattgaaaaggcggtcggtaaagatggcatcatagagaaacaattgtcggctcaggaagaaaagctgaatgacatcaaaagaaagctggatgcagaaggcggcacgattttattaattgacgctgcaaatgacagcatttccgtaaaggatgatcagttttttacgtcccggcttttgacgctcgcagggtttacctatgcggtccagacggattccggcgggaaatcagactctatcaagatggcgcccgggcagcttttgcatatcgatcctgattacatcgtgctgttggacggtgagaaagaactcgaaaaaaatcacctctggaaacagctgacagccgtaaaaaacggacacgtttaccgcgcggacagggcggtatggacggagcgccggagcattgacggggcggacgccatattacatgatcttcagaaaaaaatgctcgccaaaaaggcccaaaactgaattcgggcctttttgttatgattctgataggtggctgcttacattgtaatctttgatgcgccacttattttcaattcgttcgatattgcttaggcacgcattgacaagctttgcgttttggatgccggtatcaccgtcagaaatggcggacaagagggcatgaatggctgcgccgtgagcgacgatcagaactttttgctcaggaaaccgctcctgaactttcactaaaccggcaagcattctgtctgtcagctcttctgctgtctccatgttcgggtagtttttatccgggtagcgcttcgaccgttccggtaaagacattccttccgcatcaccgtagctccgttctctgaaatcttccatgacgacaatgggaagattcaaaaatccgttaataatgtcagctgtttttctggcccgtttcatcgggcttgagacgatgacatcccattcggacccctttaagtactctcctgtttctttcgcctgacgctctcccgtcgcatttaacggaatatccgatttgccttgaagcttcttttgggcattccaatcagtctctccatgtcttactaaacaaacggcagtcataaagtctccactccgatcatttttatcgatatcatctattatactgccgttacgttaacacttcaaagagaagcgccagtccgactccgcctccgctgccgatcgctgctgctgcgtagcgggcatccgggcgtctttttgcttcataaaaaagccgggtgacaagcgccgctccggaagccccgtacggatgcccgacggccagagcgccgccccggacatttattttagaatacggcactcgaagctgctgtgaaaaaacgcatattttgacggcaaacgcctcgttgatttcgtatatatcaatatcatccggtgacaggtcccgttccttcaaaagttttttgacggcataaaccggagctgctgacggataatgcggatggacgccgcttaccgcgcttccgataaaacgcaatcccggctttaaaccgagagaccgcgctttttgttcttccatcacacaaactgccgccgccccgtcagaaattccgcagctgttggcggcggtgacagagcctccggactgaaagacgggcttggcacgggagatgagaggctccatgttccgctttttcagcatgctttcgtcagcggcgaatccgtgacagggaagaatttccgggcggtacaagccgtcttcgtgcgctttgacgctccgttcatagctgagaagggcatattcgtcctgcatctttctcgttacgccgtaagcctgtgccgtatactctgctgctatgcccatatcaggatcgccgatgtgttcaggagaaaagcgcgcccgggatgagaaaggggaacggctgctgctctccgctcctcccgcgatgtatgtgctccccgcaccggctttagcaaagtggcacgcgaccctcacggcgtccagtccggagccgcactgcctgtcgatggtcgtaccggacacgctcaaaggaagtccggcggccaaggctgacagccgggcgagattcccgccgcggcccgtcgcgtttccgatcaggacttcatcaatgtcttcgggcatgttccggctcaaatggcggatcagcggagctgccaaatcttctgggagacagtcttttaacaggccgttttcccgggcgaaaatcgtccgtttcgcatccgtaattacagcttccattccatcatgtcctttgcctgcttttgtacggcggcacgggcgatctttccgccggctgtttccggtatttctgaaaacagccactttttcgggattttatatgccgccagctgctcgcggcactgtttcttcagttcctttacatttgcatctccgtcgatcaccgcaacggcgatgctgccccaataatcatcaggaatgccgatgacggccgcttttctgacgcccggacagcggttgagcacacgttctatctcttcagggaatacattcaggccgcctgatacgatcatcccgttttcacgtccttcgatataaagatagccttcacgatcaatatatcccatgtcatcaaccgtcatccagccggaatcatcaggttttgcgccgttgatgtatccggaaaatttcatcgggctgttcacaaaaatcttccccgtttcgcccggcatgcagcgttctccgccgggccggcggatttcgattgtaacattttcaaacgggcggcccgccgcgtcaggctttcgggcgctgtcttcaggcgataagaacgccacgaaactcagctcggacgttccgtaaaaatcgtacaaccgcagatggggatagcgctctgacaacgcttgtttagacgaagcgggccagtctgcaccggaagaaatcaccttgagcggtgtatccggaaacgcctctagtgagagcagggcgtccgtcattgtcggaacggtatatagaacgtcagcttgtctgagccggtctttcattccggccgggttgaattttctttgaaggatgacggttccgccgataaacaaagtgctgacggcgccgtataaaaagtgtgacgagcgaagcatgcccggtaccagcactttgtcatcaggggaaatgccgaattcacgtttcgtacaagaaaagctctccagccacgaacggtgagagcgggtgaaggctttcggcttaccggtcgatcccgaggtgaatccggtataaaagggcaggccggcgtttttgataaaagcgccttccattttttccgcctcgatcaaaggcctgcattcatcccacaggatgacaggcgttttgacgccgtccagtctgccgctcagccggcggtcacagatgacgaggccggttttgctgatgttcagctggtccgcgagttccgccgctgccgagcggggatctaacggaaccgccgtgcagccggcatgcgccgcccctgcgaaaagttgtaaaaaagggatgccgttcggcagtaatattgcaatgttttcgggcttacctgaaaggctgccaagccagtttgcggtttggttaactagcctgttccaagtttgataggtgatctgttctgtttctgtctgaattgcgatctgttccggcgcttgtccggctgtatctgaatatgatgatgtaatcatgatgactaaaatcagcttcctttcgtcggcaaaagccggcttgcttgaagagtttttctgattcttacggctgcgaatgaggctgcggccgctttaagcagatctccgggcacatagatgaggctgagctttacggcagttaagatatcaatgtgcatcataaaagcctgaacgggaatgccgatgacatacaaaaacagcacgccgaacaagaactgtctgataaacaaatgggggacagcagctgagcgaaggccttggatgctgaggctcagcagtaatgccgccagcggatatgcgatgagatatccggcgctcggcccgaaaaaaaccccgaacccgcctctgccgcctgaaaggagaggcgctccgcatgccacaatcagcaaaaaaagcaattggcttaaaaacgccgctttcggttttaggatgcttcccgataagagcactccgatcgtctggagcgtaatcggaaccggcgtaaaggataagaaaagcggcgggagcagccccaaaagtcccataatggcggtaaacacggcaatatgcatcatttctgtcaatttcattatgtattcctccagcttatcaaaatatgtttatacaataaagcgagtctttatatatgtcaactctattatattttaagttaacattaaaaagaccggccctttatgaaaaaggccggtcggtttatctttattcttctgtaaggataacaagtgaatcaacggatgatgcaacgtgggaaacggcgcggctgacttcttgaaggccgccgagaaaggcctgcaaatcaacgtcgattttgcctgtctggtctttgctcgttttcatgctttggacgatgtcatcaaacagacggttgatctgcgccattttttctttcgtttcacttacaagtccgtttacatctttaatatgtttggacacgatgttgatttgtgtattggtattgttcacgagctctgatacggtggaaacggtttttttcgtatcctctgaaagctttcttacctccgtcgccacaacggcgaaccctttgccgtgctccccggctctcgcggattctattgaagcgttgagtgacaggagattcgtttgctcggcgatccccgtcacgatgccgaagattttttcgatctgctgggcgatgtcattcagcttgtccatttcttcttcaatctgcagaagactggcgtcgattttattcatctgctgctgctggctttcaagctcttttttcccgccgattgatttttcttcgacatgtacggaagtgacggtgccggcttttgacgcctcggaaatgccctcagatttatcgaccagctcttgcacggctctgctcgtttctgaaaacaaatcagcgagtgatccggatgtttcctggattttttgatgaaggcgggctttcttttcctcttgttcgtcacgctggcagttatattcagtctggaatgcttcaaggacgagctgctgttcaagattcaatattttcgtcgtcgctttgatcgcttttaaaagctcatgcaaatccggaatggttgcttcatatatgttcatcatcgacagaagcagatcctgaaacgctcccatataccatttcggttcaaggccgatccgcaagtggatggaagcgatgcgctgtcttttttcaatgaattcatcatcaatcgtgccggcgaacatctcatggatatgacgccgtaatgtttttttcaggcgctcgaccgtgctgtggtcgttaatgatcgtcattaatgatttttcgtggtccaggtttcggtaaaaggaatctacgattgttgagatatgttcttttattaacggctgcagctcttcaagcacatgaagttcttcgtttcccagcctgaccattttcagctgtttttggacatctgcatattgatttgaaagcgcgatgcgtttttttccatcggcttccgaaaaataagctgtttcttttttgcggtcttttttaaataacaatataagttcccccagatattctctttttctttttatcggtatggaaggaacttgaatgaaggaatctgataaaaatattttaatgcaaaaaaataaaaccattcgtacagaatggtttagttaatcttggctgaggcgcttcagcggcttgatggcgggaccttcggcaaccccgccgtcgggtgtgaaccgggacccgtgacaaggacagtcccacgtccgttcgccgtcattccattcgacctcacagcccaaatgggtgcatgtcgtatcgacaagatgcagacagcctttttcatctttataggcgccggcccgtttgccgtttaccgttacgatttttccctccccgggccgaagagtctcaggtgaagcgtccggcctctcaagtttgcccgagataaggtgtttggccacgtcggcattataggaaatcagttttttcagtcccggatctgcgtggaagcgtgacggaataaacaggccggaaaacgggttctttttgttttgaatatgatcagcaaaaagcttcgcggcgagcgctgagcttgtcatgccccattttttaaaaccggtcgccgccaaaatatgttcttcatctcctgagatgggaccgatgaacggaattttgtcaatggtgacaaggtcttgtgcagaccaatgatatgggatgctttcaaccccgattgtgtcttccgcaaattgtttcagcgcttcgtaatgctcggacatttcttttccctggcctgttttgtggctttcgccgccgacaagaaccagtttttcaccgttcaaatcggtgtatcgcagtgatctggacggcttgtctatgctgagatacatcccgtccggatacgcttgtttcggttttaccgcgagtacgtaggatctgctggcatacattctggcggcgtaaagcccgcctccgtcataaaaaggaaagtgggaagagcagacaatatagctgcacttgatgccgtgtctgtttttcgtgaccacttccggctgcggttctttttttatgtcgatcgcagccgtctgttcaaaaatccgcgccccgtttttaacgatctctttaacgagcgccgcaccatataaaagcggatgaaattgcgcctgattcttcatggcgaggccgagcctgcaagcaacggggacgggaagttctttcacaagctcgtgttcaataccgagcttggtataagcttcctgctcactgcggatttttttgacgcctgattctgtattggtgtaaagatatgcgtcttgttcaatcagtctgcagtcaatcgaaaggtccttgatgatctgcttcatgtcttccatggcgcggagatgggcttcgaaatacagccttgcgctggtcagaccgatctgctgaataagatcggcatagatgaaatcatgctgggcggtaatttttgcggtcgtgcccgcggtcgtcccgtttaaaatccggtctgcttcaatgacagcgacacggaaacctcttttcgtcagttcgtatgccgttgtcaggcccgtaattccaccgccgatcaccgcaacgtcgcattctgtatcttcagtgagggcgggaaaggaaggaatgtcagctgttgctctccaataggaagccggttcctcgtttgaaaaagtagtcaattcaaatttacctcctctgttgtatattcttaatttttccaataagactctattcatacatgaaattcgtataagatactcaaattactcataatatagtaattaatgtaaaggagtgatcaaaatggctaaccagaagaagaaaaccttgccgccgcagcatcaaaaccggcagccgggctttgaatatgtaatgaacccgcgccccgtttttgacaaaccgaaagcggcgaaaaaacttgaagggaaaacggcgatcatcacgggcggagacagcgggatcggccgcgccgtatccgttttattcgcgaaggaaggcgctaatgtggtcatcgtttactttgatgagcatcaggatgccgaagagacgaagcaatatgtagaaaaagaaggggcgaagtgtctgctgatcgcaggggatgtcggcgacgaagccttttgcaacgatgtcatccgccaggcgggccaagcctttccttccattgacatcctggtcaataacgcgggtgagcagcacgtgcagccggggattgagaaaatcacgagccaccagctcatcagaacgtttcagacgaatattttttcaatgttttacttaacgaaagccgcgctccctcacctgaaaaaaggaagttcaatcattaatacggcctccattaccgcctataaaggccacaaaacattgattgactattcagcgacaaaaggggcgatcgtcacgtttacaagatctctttcccaatctcttgtcactcagggcatcagggtaaacgcagtggcgccggggccgatctggacgccgctgatcccggcgagcttctcggcgaaggaagtggaagtcttcggctcagacgtgccgatgcagcgccccggcgagcctgttgaagtggcgccaagctatttgtacttagcaagcgatgattcctcatatgtcacgggccagacgattcatgtgaacggcggcaccatcgtaaacggataatctaaaaaagccaatccatatggattggcttattcactctgtttgagtgcggcatattcttttgaaagcgtgaggaacgcttctttatttttatcatcaagcgccttattaatctgcatggtcagcatggcgagccggcgtttatacaaggattcatcaagcaccatttgaatgtaaatatcggccattgtcacatcgaattcgtttgctttttgcgtgttgcgggacttcatgagctcagtgtacgactttttctctttcataaagaatccccccaatgccttttttatagtatatggataacggccggaaaaatcaattaatttttataatctttagacaactaatacttggaaatatatcgacatatcctgcaaattgacgaaaaaacgaaaatgatcatcgtataaatgaggtgaaacgaaaaagaaaaacaatatttaaatagtaatttaagactaaattacatctttaaaaggtgatttttagctatattcaaaaaaaacctgtcgttttccaatgacagatgatagattattagtataaattttcaagaaaaggattggaggctgcacattatgtgccagaaaacacacgcacccttagaaagctacgaagtaaatcgttcaaccatcgctgttttgcctgaggaaatagacggtaaaatggggtcgaaggtcattgaaaaagactgcattctgtatgtcagcatgaagccgattcacatcatcgacagaagctgccgctactttggctccagctatgccgggagaaaagcgggaacatatgaagcgattaaaatttctcacaagccgccgattatggtggacccttcaaatcacatctttttattccctacactttcttctgcaaggcctcaatgcggctggatatctcatgtgcacgttaaagattttcaaccgacggcatttgatgacacagctgtcacgttctcaaacggcaaaacgatggaactggaagtatcctatcattcttttgaaaatcaggtttacagaaccgcctatctcagaaccacttttcaggacaggatgggcagtcatatcccgaagcggcaggaattcatgctgtatccgaaagaagagcggacaagaatgatctacgactttattttgcgggagctgggggagagatattagagaaagctgtgatgtgaagggacgggccctctccttttggggagggcttttttcgatttacatgcccggatagagttgtatcgtgtccgtctgttggctatgatgatgtaaagagtaatgatatttcattttaggagagatgggcatggatgtatttgcaaaatatatatcaggaatcgataacccggatcatcggctcaaagcaggggaaattttgtcgtggacggctgaccaatttccgaacttagaagcgcagatcaagtggaacaaaccgacatttaccgatcacggcacctatatcattatgtttgccgcggcaaagaatcatttgagcattttacctgaaaaagagacgatggagcactttgccgatgacatcgcccaagccggctacagcgcttcttcgcgcctgttcagaattcaatggactgaaccggtgcactatgatctgcttaagaaaatcatcgaatttaacatcaaggaaaaagctgaaaatccggggttttggcgctagcggacgtgatgttgaaggaggaagacatggacgttttcaaagactatttatcaagtatcgacagcccggatcatcgtctgcgaatggaggaaatcctgtcgtggacggctgaccaatttccgaacttagaagcgcaaatcaagtggaacacgccgatgtttaccgatcacggcacctttgttatcggctttgcggcagcgaagcatcatgtaagtgtttcccccgaagaagcgggtattacgcattttgccggcgacattgcccgcgccggctacagcgctacttcccgcttattcagaattcaatggactgaaccggtgcattatgagctgcttgaacgcatgattcaatttaatattcaggataaggcggactgctcagcattttggcggaaataatgaaaggaatgttaaaaaaacaaccctgaggagggctgtttttttattaaaagtaatccgagaaataaggggtttgcgtttccagcaaatcctcaatgaattccaatgtgtccgggctgcattcgagccggcccgtgcggtgaaggtattctggtttccggtatgcaaataataatgccgtcatcgtctgaatatccagtttcgccgcatcagcatcgccgcccgggcttaaaacggcttttccttcaggcgaaatctccgctgtaaagacgccctgattccattcaagcagcggatcttccagtgtaaaagaccatgtccgcttctctttttgcggtttaaagggatactgattgataaattgctcaatatcgacaatccgggccataaagtaaggagaaatcgtttcctcaatttcagcatcttctaacagaaaggcgatcggttcattagaataattgtcgccgacgacttttgtcaccatggagaaatgagccgaaataaagttccacaggcctcttcgcgcttcttcatttacatataccatttctttaatatgaaaaacttcatctgcaatccagtaaagaacataaccgttcgcctgtctggattggtcataatacacggcagccgtaagctcttctaaatcccagcgccaatattcatcccatgccagttcatttctgatcatggccgcatggcttttatgcgcgaatcggctgtatacttctttaatgacctcatgttccggctcgacgcgttccacttcaccggaaacggtgctcattttcgggagctgaaagtctttcacctcaaacgtcattttatcgctgataatttcccagccttttcttctgtagtaagggatggagtaggggaacaaataggatacggactgaccgcgctcacgcatgtcaactaatgctttgtataacagtttcgccattaatcccatattggcgtactcgggatatgttccgacccccgtcacaccgcccatttcgaacgttttattaaaaatccggacttgaaatggataaacggccgcctgtgaaacgagtttgtctttgtcaaaccagcccaatacatgcgcttgttccaaaacggggagttttgcggaggcgatttcgggttccttccatcccacttcatgcagattactgttcgtgacttggaaaacatatcggagcagctgattaaattgctgcaaatgtttcggtttgactttctttaattcaagccttttttctctgttcataaatttcgctcctgtatgaataatgactgaacgtcaatcatttttgtggtttacataaagtgtacatgaaaatccgcctcgtttccaatttttcacccggcggcagtattgacataacgaaacgcacgatgacagaaatcgtgcgttcaaaattctttatttgatgacagacatgctgacgctgctgcctgacactgtcaatttggcaaaatcctgtgtatcaatcacaggtgtgactgctttattgtcgatcgtgatgttcgtaaaggctgttgagaagtttgatttgatgtaagggcgctgatcctctgatgtgaccgcgacggtggcgagcgctttccattttgagacagagcctacatttgtttgggcgagttctgagatgatgcggccggtgtatccgtcattattcgtgccccagtatgtggcgcgggtattgccgttcagatttttgtagatggtcagctgtacggtgctgccgggccggaagcctttcgtataggtgaattggctttctccttccagatacttgacctggccttgtccctttgaaccgactttcatgatcggtttccatacatgataggtgtcactgtactgaagtccgatatcagcctctgtgcctccggtaaatcctgagtaaatataggctgtcccatttgacacctgaattgagcttggaagctgaattttcgtgacgagtacagaacccgtgctattcaggtaggcccttccgccgattcctttgctgagctgggacgccgcttccgccgtattggggctgatcacccccggaatttccgccgtacatgtgccgaatagaacggctgtagtgagcacacccgcaaaaagcccttttttcatcatcatttctcctcctatcatcatagtcagatcgcgctatcaattcatattataaaagattttgggaaaaattccataaaagatatacgggcggacgtaaattaaaactattttcctatttatcttgtaaatggatattatttgaactatgatatgttcagcaataccgcataactcaggagaggggataggatagaaatgaaaaagacggcagctgtgcttttgtctttcggtcttgtgttcggatgttcatacggagcggggcagacggcagaagcgaaaacaaaggtgaaaacgtatcaaaactgcaaggcgctgaataaggtgtataagggcggagtggccaaatcgtcgaaagtgaaaaacaagggcggcagaacaaagtacaagccgtatgtatcaaaagcgctttacaatgcaaataaaagacttgaccgagataaagactatatcgcatgtgagaaataaaaaaacaagcctctttaaagaggcttgtttttttaaatggattcggcggtgacggcggttccgtatccgattaattcggatgtgttctgtcctgcggtcagttcgaaccgcaggccgacgatggcgttcgctccgagctgctccgcctctctgatcagccgctctttcaccgcttttttggagtcttccagcatttcagtatagcttttcaattcgccgccgacgacagattttaagcctgcaagcaagtctttgccgatgtgtctggactggacgatactgcttgtcaccaagcctttcacttccgtaatctgttttccggcgacggtttcggtcgttgtcatgatcatgcgtttttcccctttcgtgtatcttaccgctatcttaccatttaagccgccttttcggctgcgctgatttgtttttttctgactgcggcgctgactgcaaacatgacggcaatgttcagaaccagtgcgatgatgcctgtattcatatccttaacgatctgcggaagaaacggaaagagggttccgatggttgattcggtcagcgtaatgaaggccaccgttccgaccccggccgttatgccggcaaaagcgccgtggcttgtgatgaaacgccgcttcggcaggctgaataagagggcggggaaaagctgggtgacaaggctgtagcccattaaaagcaaggtgacgatggtatttccgcctttcagcgtaaaatatacggatatcagcgcgatgacgggtacggcgtattttgcgagccgtgagactttttcgtcagtcgtgccgggcagaatggctttgtacacatttttggcgaacagcgtgcttgaggccattaatatcattgaaccgggtacaagcgccgtcagaatgcccgccgatccgatcagtccgacaaaccagggatcaaaggttttcacagacagctttaataacgcgagatccgtgtccgtcccttttaaaccgggcacctgcagaatcgccgcaaatccggtaaagatgacaaacagcaggacgagctgataaagaggcatgatgattgcgtttttccgaaacacccgaggatgctccgccgaataggaagcggcaaatgtatggggccacatataaaagccgagggcggtcagcaaaaccgttgagctgaaccaggaaacgctctgtccggtttccggcagcgtgagaaaaccgggttttgcggcgtcaatttgtttgaacatctccgtaaatccgccatagtaatgaatgggcagataaatgcctaaatacaggacgatgcctaaaatcatgatatctttaacgactgatatccacgctgaaccgtggattcctgatatcatcacataaatcgtgatggagacagcgccgatccagacagcggctgagggcggaatctgtccgtatgacgttgctgaaacaattaatccgagccctttcagctgcaggacgagataggggatgagggatgcgatgccgacgagcgatacgagaatgccgaggagagggctgttgtattttgaaataaaaaaatctgattgcgacatcagtttgtgttgtttggcgtaagtccacacggctggcagaagccaatatgacaaaatgtaggcaaggcagccgtacgcgataatataaaaggcggggcctccttttccgtaagcccatccgcttccgccgaggaatgtaaaggtcgtgtatatttctcccgccattaataaaaagacaaacatcgtgccgaagccgcgtccgcccaccgtccattgttcaaggtccatatgttttccttttcgggcccggattccgagatatacacaaaacaggagcacggcggccattacgggaaatgctgcgttcattccgcctcacccgccttgttttctttgtccaatttgtaaacggcggccatcagaacggaagtcagcaccgcccagatgacgacatacgcgagaatgaaaggcattccgaaaacataaggcgtcacccggttggcaaatggaatgccggcgagaattccgaaaaagggcagggcggcgagaacatgaatcagtttcataacattcctccttttcattgaaaacagcgtgtcccgattataaagaaaatcatgtcgaatgtatagtgtgaatagtctgaaatttatcagttgaaaaggaaaagcagtcccggctgctttttaaatggtcgcaagagacaggtaatattctaataaggcggttacctgttcccgtattctcgggttgaaataacggtgtttttcttcatagccgttaatggtgcatatataaagcgtaaatgcttcgtctctttccgcttcgtatattttaattttacgctttcttaactcttttcgaacatcactcaaatccttttgtgctaattttaaagagcagctgataagctgtttatagggttgttttaatttgaacgggcacgaatcaagcgcttcgaggtcccggttcaggatggcagccgccatgggcagaaacagccctttttcgatgagatcgcgggtgctgctccggatgtcaggcataaatactccttctttcttaaaaaagagaacgtttgttcttattttatactcgcttacacgatatttcaagtcggaaaatctcgtaaacattttcgttttttggagataatgtgtagaataaggatagacaaactcgttaaggagtataaacgttggagcaatttttatcatatttgactgaggaacagctgacggaatggttccaaagctatagagctttcggcccggcggctgcggctgcactgccttttattgaagcgtttcttccgtttttgccgctcgttgtatttgtggtggcgaatacgaatgcatttggtttgtgggaaggtttttttctgtcatggctcgggtctgcggcaggatcgatgctgatgttttatgccgtccgccgtttcggacagaaaagagctttcggtttcatccgcaggcatcagaccataaggcggatgatgctctgggttgagcggcacggtttcggtccgctgtttattttactttgcttcccctttacgccgtccgctgcggttcatatcgttgccggcctgtcacgggtgggggcgctgcagtttatatcagcagccgctatggggaaaatggtcatgatctttatgatcagctttatcgggtatgatcttcacgcactcatgacacagcctttcaggatggcgggcgccataatggtgatcgcggtgctgtggtatgccgggaagcatatcgaacggcgtttacagatgagaatcagtcagcatgagaaagacggagggagacaggaatcttgaaaaaacgattttggtttatagccggcgtgcttatcgttgttttggccatacaattaaagaatgccatttttattgattataaagtcgaaggaatcagcatgaatccgacctttaaacaaggaaatgagctgatggtcaacaagttttcccatcgttacaaaacgatccgccgtttcgatattgtcctgtttaaaggcccgcaccgcaaagtgctgatcaaacgtgtcatcgggctccccggcgagtcaatcgcatacagggaggatcagctgtatgtgaatggaaaacgggtggcggaaccgtttttaaaaccgttaaagtcatcattgtccgccgggagccatgtgaccggtgattatacgctgaaggaaacgaccgggcgcaaaagcataccgaagggacaatactttgttattggcgacaaccgcatatacagcctcgacagccgtcatttcggtccgattaaggataaagacattgtcggagtcatcagtgaatcagacgccaagtaaacggcgtcttttttttcggaaatgattgtaaaaaagcagagggaagactataatgaaaattgttacgcgcgaaacaaaaaggaggcgttttattttttggtgattttgttactcgtgtaacaaaaaatatgaaagagggctgatgagatgaaaacacaggctgccattatcgggggaggtccggtcgggcttatgcttgcatcagaactggcgctggccggagtgaaaacgactgttattgaacgattgaagaagacggtgccatattccaaagcgcttattatgcatccgcgaacacttgagctttttgccatgagaggcatattggaacgctttttggaaaaagggacgaaggtgtcttccggccatttttccatgctggatacacggctggatttttctcggctggatacgaagcagaattattcgttaatgctgcctcaggcagaaacggagcggattttggaggagtatgcatcaagtctcggcgcagacatcatccgcggggcggaagcgatggctgtcacccagacggatgacggagtggagacggtgttccgggacgaaagcggtatccgcactcttcacagcttatatgccgcgggtacagacggagcggggagcattgtcaggaaacaggcgggcatcgctttttcgggcactgatgccgacttaacaggaacgctctgtgatgccgctttgacacatccgcccgaatcttcctttttttcaacgtgccgcctggagggatcggttgtgattgtccctcttacggacggacttttccgcgttctcatcgtttctccgcacgctccgcaaaagcggaaggaagagccggtcaccgaaaatgagctgaaagaagacctgcggcggatatgcggcactgatttcggattgagtgatccggtatggatgtcgcggttcggcaatgccgagcgtcaggccgaacaataccgatcaggccgggtttttgtggccggtgatgcggcgcacattcattttcccgcaggcggccaagggctgaacacggggcttcaggatgccttcaacctcggctggaagctggcggcgcaaatgaaggggaaagcggcgcctcatcttctggacagctatcatcaggaaaggcaaagcacaggaaaagaagtattgcacaatataaaaacccagataaagctcatggattttaccgagtcggggatggcattaagagaaacgatgaccgctttgctggattttcaggagtccaaccgtttattggcgggaaaagtatccgcgcttgatctgcattatgaaccggatgcggagctgccgccgcatatcctgaacggaaaacgcctgccggatatcgaattgatccttcatgacgggcggctgacccggctgtatgattttcttcataagggcgcctttgtgcttttatcattaagagggagcattcccgccggtattgatacggacagcgtggcagctgtcagggcggagcttgctgaaacacgtgccgattgggatgacgtccacaccgttttaatccggccggacggccacacggcatgggcagccggcggctcgggacatgaagcggaagaagctgttctggccggtttggagagatggggattcatctgatacccttttatgcgcctgtgtgattgtttcttgtgtaacaaaacgttatagtaaaagaaacaatcaatacggaagggtgattcagcagttggacagaagacagccagaccatgcaaaacacatgattcttgaagggctgacagatatttttcacgagcaggagaggtgtcaggaggacatcagggcgtcgttggccggacggatggacgaactccgtgaagaaaacggaaaaaaattacagctgaccttgacggaaattcacattttgtcgtgtatcggagatcatgaaccgatcaatgtcacgtcaatagcggaaaaaatgaagacgacaaagccgaccgtgtcgagaagctgcgcgaagtttttggaagccggctttctgcgcaggacccggctgagcgacaataaaaaagaagtctatttccggctgactcctgccgggaaagagctgcattcccttcatcatgaatatcatgaattgataaaaaagcggctcttggcgtttttagaccgctatacagatgaagaactgttatttgctgaacggctgttccgtgatctttcagcaaactggcggtctgtaaatggcggcggagagctgttcaaataaaaaacacgcatatggatgcgtgtttttttattcggatcatgttcctctttctgcccggcctctctcgccgtgtgcccgtttcagctgagaaaggtggtgcagcagccgatagaagggcggaagcatggcgatgacgagaacgatccggatgacctgaaccgcgacgacgaaagtcgagtcttcgtgcagggtgatcgaagtcgccgccatctcggcgatcccgccgggagaaaaggcgagaacagatgtaatcatggagatgcccgttaatttagaaaccgcaaccgcgctcagaatcatggcggcgattaatccgacggaagaaataaatccgacggtcagcactctcgtcacaccggtgaacatgcttttgtacatttttgatccgattgtggcgccgagaaaaatttgtgacagctggttcgcttccggcggccaccaggccagcatgtctttgcccgccaaggcggacacgccgatttccgcagcagcaacgccgatcatgctgccgagcagccaaggggcgggaaatttcagccgttttgcgcctttgcttgcaagccaggcagccaaaataaatccggccgttaacaagacgggagtaaggcccggatgtgaagctcctgccgaaacggctccggctgatgtctgagctgcaccgttttgtttggtaaataagaaaatgacgagaaacggtattgtcatgacgaccaaaaggacgcgcgtcagctgaataaggcttacaatcgcggtgtttgcgccgacttcctgggcgataccgggcatggcggataaaccgcccggcgccgtgcctacaaagcttgtcatcatgtccgtccggctgaaccgaaagagcacatatccggaaacaagcgccatcacgatagagaaaatcagcatgaagcctaccggaagccaatgctcccgtaaaaccgacagaacggacaggttcagtttctggccgagttcgatgccgaggatcatttgacccgctgcaagccatctgcggtgaatccctcttctgtcaggcgccatgaacagccagcggggcctcgtcatggagaggatgcagccggcggccagcgttccgagcatccaggcgatcgacatccctgtaagcgaaagaagaaacccccctgccgcactgatgagaataaaccagatatccgtaaggagatgtttgtctttcttcaatgaaaacccttcttcctgaaacattcatattaaattgttaagctcgttaaccttactattactatagtatagattttgagataaataaataatgaattatttctcataatccattcatttttcttatcgcaaacgcaaaaaaagctccggagatgggtgagtgcaccctactccgaaacctcgcccgcttttcctttccacacaaaggtcaatcccagaccgagaaataaaaccacacctgcgaacagaaacgggaagtgaatattcatatcaaataaaataccgcccacagccgggccgaaaatggtgcccaaactcgtgtatgttgagttcataccggcaacaaacccctgctgatttcctgcgattttcgataaataagtagtcagtgccgggcgcagtaaatcaaacgcaaggaaaatgatgcaggtgacagcgagcacgggcaaaaatcctgacatcaccgtagaaacgaaagccagcacagcgccgatgatcagacaaagctgaatgacttttttctccccgaggaagttgacaagtcttccgaacgcgagtacttgaatgaggaccgccacaatggagctgaacgtaataataatggcgatatcctttggcgtgaagccgaatttatggtttgtaaataagctgaataccgtttcgtacgccgacagtccgaatgccaaaacaaaaacgatgataaaggcgatcaagtagtttggatgaatcgactttttcaaatcttttaagaaggttgattctttgacgctttccagctgctttgcgcgttcttctttagttaacggctctttcagcataaagacagaggaaatcactgcgataaatgcaattcccgccgcaaagaaaaacggcatacgaacgccgtgatcggcaataaatcctcctatgccgggcccgatgataaaccctgtgctgatggcggcagatacatagcccatcgccttcgatctttcctgcaccgtcgtaatatctgcgacatacgctgtaacagcgggcatgataaaagcggcactgatgccccccagcacccttgcgaaatataaaatggagacatgtgtgcccaatccgaaggtcagttcggataatgcgaacaaaaacagtccggcgagaatcatgatttttctgccgaagcggtcaacccatctccccgcaatgggggatgcaattaattgcgcaacggcgaaggcagcgacaaggtatcccattgtgctgcccgtcaagtgcatcacattcataaacagcggcataacgggaatgatcaatccgatgcctaaaaacgcaataaatatgttgcttaataagatgatgagtacagccttttgttctctgatcggtttttgcatgttgtttctcctttgtcagctgtcattctgtttatcagcgctgatcgacccgtgaataaacacggagatggcttctttttgcaattcgattctttgctgaatggtatcgtttttatataacacatctaaaccgtagaagacggatagcaggatttttacttttgattcgacatgatgaatggaccagctgccgtcttgatttccctcttctaagatctctctcatcacatcgtcatattcaatatcaattttgttgagccgctttacgacctcctctgacgtaaacgcactcgcataaaactcttcacttgctctcataagcgggtaattgatgctcatccggctgagcagctccgcaaagcccgtcaatttttcggcagcatctttcagatcagcttccatttccctccacgtctcgatcatcacgcggtgatcctcttccatgatatgaagaaacagaaactcttttcctttaaaatggtgatatagattgcctttactgatttcggccgcctctaaaatctcccgaatcgatgtttctgaatatcctttttttgcaaataagtcacgcgaagcggatacgagcctgttcttcgtcttttcgctcttttcggcaccgccttttgtatttgtcacttcacacagatcctttccgcctcattcatatcgttgtcccggcaaagcggggctcggttcgtttaaaaccgaccagttggtttattttattataaagggtttttgctgattatacaatgaagaaggtatccattgtttagagggagtataaaacggctcgaaaagtaaaccccattctctcatgttgaaagaacggggtttgtcagcggtctgaagactcccggcgggggagcgtgctctgcctgaaccgttatttgccggtattcacctcggtgtagcttgtgttcggcgcgtttgataccgttccccctgtatggtgggaaggagagtgggccatatcgtataaaaaccagacggcatgacgctgttcgtcaaatgccgtgcgggcaaataaccgcttcgcttccggatgcaccgctctatcggatgcctgcaaataaaaatcattcgttttctgctcatcataaaacgccgccctcagtccttctctgtatgtgtgcggacaatgctccgtctgtttcggcatcaactgttttccggtaattgacgtatacagtgaagagaaagcgtgcaggtggcgcacttcttcctctctgatatgttcgattcgtcttctgatttctgcggtcggcgctttttcggctaatattgagtagcaaatcacagcgctgtattcaccgtttatggattttaccagatccttgataagcacagaatcgtcactgcagatggctgtataatgaaaaaaattctcgtgcattggactcacccccggatgtttatagggtattatacggcggcagcccgtgacatgtgcggatgtcatttttattcttgatctagcggcgatgtaatatggtcgtcgtatgtgtcgacaaaaagccggccgttgcttccgcgcacagcgtatacgacgtcttccggtttgaggtttctcttgtccaattcttctctcagccatttttccgatacgtggttttcttccagattcttcatcaccagccggccgtccataatcagctcaacggcaaagttcttttcatgtccggcaaagatgccgagatcctttcttgtaacgggcgcaaattccggtttgacctccactgacatgctgccgtttgtttcaatgatggcagtctgaacctgagaaatgtcaaatacgtcatttacacgcagctgctggttcaagtagtcaatggtataacgcattgttttcatattatgctcaagtattttaccgttttgaatgataatggtcggtttgcctgcaaagaaacccctaagggccctgtttttcatagaaagatatgcgacaaggtaaatgattgccacgaaaataatgtaggcaatgacattataatgaatcggcagctttgtattaaacgacagatttgccgtgatggcgccgagcgagatggccgcaatgaaatcaaaaagcgtcatctgtgaaatggtttgtttaccgagtatccgggcgccgataaacagaatgctgaacgacagagccgtccgtacaattacttcgggatattctgacatcatcattattccttttttctttattttggtcaaaagcgatactttttaaaacagtcatcccgtttttaccagcagatgagattggtcattttcgtcaactttcgataaaatgtagaaagataaaaagagaggggtcttctaatttgggtgttgagtttttagtaggcagatcggggagtgggaaaacgaggctgattatcgacagcattcaagatgaactgcgccgggagccgttcgggaaaccgatcatttttctagtcccggatcaaatgacgtttttaatggaatatgagcttgctaaaacgccggatatcggcggcatgatacgcgctcaagtgttcagtttttcgcgtttggcgtggcgcgtgcttcagcataccgggggcatgaaccgcccgtttgtgacgacgacgggtgtgcagatgcttttaaggaaattgattgaagaacataagcacgagtttaaagtgtatcaaaaagcgagtgacaaaaccgggttcactgagcaggtggaacggatgctgacagagtttaagcggtactgtattgagcctgaagacgtccgccgcatggcggaaagcggaacggcgtcagaatatcgcggagagcggatgctgtctgaaaaacttcatgatttaggcattttatatcagcagatggaaagaagcctcgccggacactatttgcattcagaggattatttgacgctgctcgctcagcagattcctttggcggacgttgtaaaaggcgcccgtgtttacgtcgacggattctatcaatttacgccgcaggaattaagggtgctggagcagctgatcatgcatgctgaacatgtcacattctcgctgacggcggacagcccttcggcggaacaggcaccggatgagctcgatctgttcagaatgacgggaagcacatactataagctttatcagacggcaaaggaattgaatgccgatatttcctgcaaggaactgcatggcacgaagcggcatcagtatgcgccggagcttgcctgtatagagtctcagtacgatgtgcgtcccgccgcggcgtataccggcggacaggaagcttttaccgtcatgcaggcgcaaaacagaagagctgagcttgaaggtattgcccgggaaattcaatcacttgtccgggatggaggataccggtacaaagatatggcgattctcatccgtcagccggaagattataaagatttgctgaaggaagtgtttgccgattacgggcttccttattttattgacggaaaggcttctatgcagcatcacccgcttattgaattcatccgttcaagcctggatgtcgtgaaggggaactggagatatgaagcagtgttccgctgtgcgaaaaccgaactgttattcccgcttgatcagccggagcagaaaataagggagcaggtcgatcagcttgaaaattactgtatcgcctatggcgttaaaggggagcgctggacgaacggcgagcggtttgtatacaggcgcttcgtatcgctcgatgaggatttcgcgcagacggatcaggaaatagagatggagcacatgctgaatgagacgaaagagtggatggccgcgccccttgtccggcttcaaaaccggatgaaaaaggcgaaaacggttcaaagcatggcggaggctctttatctctttttggaagataccgatgttcccctgaagctggaccggaaaaggcagcgggccgaagaggccggaaacatgatcgaagcgcagcagcacggccaggcgtgggatgccgttatccagcttctcgaggagtttgccggcatgatgggtgaagatgaaatatctttggcgctgttccagcaaatgcttgaaacgggaacggaatcgcttcatttttctttaattccgcctgcgcttgaccaagtatttgtagggaatatggatctctcaagaatgtacggcacgtcctgcacattcgtcatcggggccaatgacggcgttcttccggcgcgcccggatgaaaacggcgtgctgtctgatgatgaccgggagtggctgaaagcggtcggagtggagctgtcttccgcggggcgtgagcggctgcttgatgagcattttctcatctatatggcgctgtcgagtccgtctgaccgtctttatgtatcatacccgattgccgatgcggaaggaaaaacgctcctgccgtcaatcgttgtaaacaggcttggcgagctgtttcccgatcatcaggaaaagctgtcagcggctgatcccgagcaggtaagcgaagcagagcagcttcagtatctcgtcaataaacaggtggctcagacatatacggcaagccagctcaggctgtggacaagagagtacgagatcagtgacgtatggtggagcgcatacaatgtgctgatgaaagagcctgatcaccagcgtgcgaaaaagctgttttcaagcctgtttttccgcaatgaggcgaagcgtcttgaacggtctgtttcgcgccagctttacggcgagcatattaaaggaagcgtctcccggatggaggcgtttaatgcctgccagttttctcattttgcatctcacgggcttcaattaaaagagcggcagtttttcaagctggacgcgcctgatatcggccagctgtttcactccagcctgaagctgatttcagaccggcttcgtgagcagaagctggaatggcgcgatctgacgaaagatcagtgccagaatttctcctatgaagcggtggaacggcttgcgccaaagctgcaaaaagagattctgctcagctcaaacagacacttttatgtgaaggaaaaactgcagaagatcgtcacgcgtgtttcaggcatattaagcgagcatgcgagggcgagcggtttcgtcccggtcggtcttgaactcggtttcggcggaagcgggccgctgcctccgctcactttcacgctgaaaaacggctgtacgatggaactcgtcggacggatcgaccgcgtggataaagcggaaagttcaaaaggcctgctgctgagaatcgttgattataaatcaagcgacagggggcttgatctggctgaggtgtattacgggctcgctctgcaaatgctcacatatcttgacttatcgattacacattccgaagattggctcggtatgaaagcgaccccggcaggcgttttgtatttccatattcatgatccgatgattcaggccagtctgccgatggggcttgatgaaatcgagcaggaaatttttaagaaatttaaaatgaaaggccttctcctcggtgaccgggaggcgatcagcctgatggacacgactttggaggaagggcgttcaaatatcgtcaatgccggtttgaaaaaggacggttctttaagatccgactcagccgcggtcagcgaacgggattttcatctgctgacagaccatgtgcggcggacatttgaacaggcgggcgaagcgataacggacgggcttgtgtccattaccccgtataagctgaaagataagacgccttgtacgtactgtgcgtttcaatcggtgtgccagtttgatgagtcgcttaaggaaaatgaataccgcagcctgaaagcggaaaaagacggcaccatactggattggctgaagaaggaggcggatgatgatgcaaattcctaaaccgaaagacagcatatggacggatgaccaatggagcgccatcgtttcttccggccgcgatattctggtcgctgccgcagccggatcaggtaaaacggccgtgctcgtggaacggatgatcagaaagataaccgcggaagaagatccggttgatgttgacaggctccttgtggtgacctttacaaacgcctcagcagcggagatgaagcatcggatcgcggaagcattagaaaaagagctcgccaaaaatccgggatctctgcatatcagacggcagctctctctcttgaatcgggcgagcatttcgacgcttcactctttctgtctgcaagtgcttaaaaaatattattatatgattgatcttgaccccggttttcggatggctgaccagacggaaggcgaattgctcggagacgaagtgcttgatgagctgtttgaagatgaatacgcaaaagggaatcaggcgttttttgagcttgcggacagatatacgacagacaggcatgatcttgatcttcaagaccttgtcaaacgggtgtacgagtattcccggtcgcatcctgacccggaagtatggctgcaaagctttgtccgcctgtatgatgtgacggaagaaagcaaaatggaagagcttccgttttaccagtatgtgaaagaagatgctgaaatggcgctcttcggggcaaaacaaaagcttgaaaaggcgcttgaactgacaaaagcgcccggcgggccggccccgcgcgctgataattttctggatgaccttcagcagatagaagagctgatcagctgccggcatgacttcgatgcgctgtatgaacgggttcccgcagtctcctttaagcgggcgaaggcggtaaagggtgatgaatttgacaaagcgcttttggacgaagcgaccgatttgcgaaacggcgcgaagaaactgatcgaaaaggtaaagaccgattattttacaagaagtccgcaagatcacttaaagagtttagcagatatgaagcctgtcatcgaaacgctcgttcagctcgtgatatcgtacggaaaacgatttgaagcggcgaaacaagaaaaatcaattattgatttctcagatttggaacattactgcctggcgattttaactgcggttgatgaagaaggccggcgggtgccgagcgaagcggccgtttattatcaagaccagttccatgaagttctggttgatgaatatcaagatacgaatcttgtgcaagagtctatcctgcagcttgttaaaagcgggaatgaagaggcgggaaatctgtttatggtaggcgacgtcaaacaatcgatctaccgtttcagacttgctgagccgctgctgtttctcgggaaatataaaaggtttacagaaagcggggaaggcgcggggcagaaaattgacctgaaccaaaatttccgcagccgctccgatattttggacagtacgaatttcttgtttaagcagctgatgggcggaaaaatcggcgaagtggactacgatgaacaggcggcattgaagctcggcgcatcgtatccgccgaatgacgcggcaaaaacggaactgctgctcattgacagcgctgatggcgcagacagctccgaggatgccgaagactttgaaaccgtgcactgggaagcgaaagcgatagccggggagatccgaaagcttgtctcatctccgtttaaggtatatgacggcaaaacaaaaacacaccggaatatccagtaccgggatatcgtaattttgctgcgctccatgccgtgggcgccgcaattaatggaagagctgaaaaaccagggcattccggtgtacgccaatttgacgtcgggttactttgaagccgtggaggtggctgcggcgctttcagtcttgaaggtgattgataatccgtatcaggatattccgcttgcttccgtgctgcgctcgcccatcgtcggatgtgacgaaaatgaacttgcgctgatacgccttgaaaagaaaaaagcgccgttttatgaagcgctgaaagcatatatagcgaacgctgacagacatgatgaactgtatcaaaaactgagaaccttttatgacagtctgcaaaagtggcggtcattttcgacgaatcattcggtgtctgagctgatttgggaagtataccgcgataccggatattttgactatgcaggcggcatgcccggcggaaagcagcgccaggccaatctgcgcgtcttgtatgaccgggcgcgctcgtacgaagcgacggcgttccgcgggttattccgctttttgcggttcattgaacggatgcaggagcgcggcgatgatctggggacggcccgggcgctcagcgagcaggaggatgtcgttcggctgatgacgatccacagcagcaaaggacttgaattccccgtcgttttcaccgccggactcggcagaagttttaatatgatggatctcaacaaatcatacctgcttgataaagagctcggtttcggcacgaagtatatccatccggaactcagaatcagctatccgactcttccgcttgtggcgatgaagaaaaagatgcgcagagagctcttatccgaagaattgcgcgtattgtatgtggcgctgaccagagcgaaggaaaagctgtttctcgtcggttcctgcaaaaaccgggaaaaacagctggccaaatggcaggcgcaagcagaccgggccgattggcttctttctgaattcgaccgctatcaggcgtcatcttatttggactttatcgggccggcgctcatccgccaccgtgacatggaggcgcacaggacgccgggactttcctcatctgaggatatcgcgcgcgacccgtcgcgttttcacatccggatgctgcagcaaagtgaattgctggaagagaatccaaaagaacgtgctgaagaaaagagcaaacgtctcaaagcgattcagcagggcgagccgattcctgattcgttttcatttgatgatcaggcgcgccgtctgcttgaatgggaatatccgtaccgagagctgacggctatcagaacgaagcagtcagtttctgagctgaagagaaagcaagaatacgaggatgaatacagcggccgctctctcatcaaaccgtcaggagacacgcttttatacaggcgtcccggttttatgatgaaaaaagggctgacagccgccgaaaaagggacggcgatgcatacggtgatgcagcacataccgctgacgcacgttccgactgccgaagaagcggagcggacggtccggatgctttacgaaaaagagctgctgacagaagaacagcaggaagctattgatatagaagaaattgtccagtttttcggaactgaaatcgggaaagaccttctcagggcgctgcggattgaccgggaagtgccgttcagtatggcgcttccggccggcgaggtgtacaaggatgccgaaacggccggtgaaccgctgctcgtgcaggggattattgactgcctctatgaaactgcggacggtctctatttgctggactataaaactgatcggatagaggggaaattccggaacggatttgaaggcgcggctccgattctgcaaaaaaggtatgaaacacaaatcgaattgtatacaaaagcggttgaacaaattacaaaaacgaaagtgaaagggcgtgcgctctatttcttcgatggaggtcacgttcttacactgtaacaagatccgaagctcctttttggagcggatctttttttctatcaaaaagtgaggtgaatgcggtatgcgcattttacatacagctgactggcacctcggcaaaacgctggaaggcagaagccggctgagcgagcaggccgaggtattggaagagctgaataccattgtcaaggaagaaaatattgatgcggtcattatggcgggggatgtatttgatacggtcaacccgcctgcgctcgctgaacaattgtattacgaaagtctttccgcgctttctgacggcggaaagcgcccggtcgtcgtcattgccggaaaccatgacaatcccgacaggctggcggcggcttctccgttaacaaatgagcgcggcattcatttaatcggctatccgcggacagaacccgtgcatattgaggtgccgtcggcggacgagctgttagccgtagccgcgctggcatatccgtcagaggcgagattaaacgaagtgctttctgatacgtttgaggaaaagcttcttcgcgatcattacgatgtcaaaatcagagaggcgtttactcacatgtgcggactgtgccgggacgatgccgtgaaaatcgcggcgagccacatttatgtcgcggggggaaatcagaccgattcagagcgtccgattgaagtcgggggagcttacacggtcgccgctgacagcctgccggctgatgcggcttacgtggctctcggccatctccaccgtccgcaaatgatcaagcgcgccaagacggctgcccgttattcaggctctccgctcgcatacagcttttcagaagccggttatgccaaatcggtgacggtggtagaagcgaagcccggcggagaagcgaagtgggaagagattttcctgtcttccggtaaaccgctcgtcaaatggaaagcgcaggggctgagcgaggttcacggctggctcgatgaagggcgtgaccggaatgcctggatcgatcttgatatccatttgacggatcagctttctctcgaggaaattcatcggctgagaaaggcgcatcccggctttatccatatcaggccggtttttgaagaaaaagagaccggcaatgaccggattgaagtgaaacacacatcaattgaggatcgatttaagaagttttatgaaaaacaaacgggcggcggcgtgccggatgaggagatggtcaagctgtttttagagcttgcgtcagcagatgatgaggaggatgcgacatgaagccgattctgttaacgataaaagggctccacagcttcagggaggaacagaccattgattttgccggactgtcaggagccggggtgttcgggattttcgggccgaccggaagcggaaaatcgtcgatccttgatgccatgacactcgctttatacggaaaagtggagcgcgccgcaaataatacgcacggcatcctgaatcatgccgaagagcagctcgccgtctcatttacattcgcgcttcaatccggtcaccgggtttcctacaaggtcgagcgcgtttttaagagaacggatgaaacgaaagtaaaaaccgccctctgccgcctgattgaaatcaaagacgaacaaacggtgctggccgataaagcgaatgaagtgaacaaaaaggtggaagagcttcttggcctgaccattgacgactttacaagagccgtcgtgctgccgcaaggaaagtttgccgagtttctgtcacttaaaggcgcggaaagaagacatatgctccagcgcctgtttaatctggaacagtacggggacaggcttgtcaaaaaattgcggcggcgggcgcaggaagcggcagcgaaaaaaaatgaaatgctggccgaacaatccggcctcggagacgcaggagaagatgcgctgaagcaggctgaacagcagtttcacgaagcgaacgaacggcttgaagaagctgagaagaaacgggtccgggcaaaagagcgctttgagaatcaccaggaaatttggaacctgcagacagaaagagatgaatatgagcgccgggagaaaaagcttgaggaaagacgcccgtacatcacggatttgactgagcgtcttaaagaggcggaaacagctctcgcccttgagccgtacgcagaccgttacacagaagccgtccgccggaagcagcgcgccgaacaggaacacgaactggccaaacggaaatcagaggcggaaaccgtttcatttacccggcaaaatgaagcctatgaagcatggcgggcccataaggccgaacaggagccgaagcttgtcaaggaagaagagctgtatcaaagactttcagccattgaacaaaaactgcttgaagcgaaaaaagaagcggaaaaaacaaatgcggaacacagcaaaaaagaggaagaatacgaagccgcctcgaaacagctggccggagtgaaagaccgcctgacccgcggccaaaacaggcagaatgagctgaaagaagagctgaaagcagttcaagtgaccgccgatgaacggaaaaaatgccagaccgcagcacagctggcggcaggctttcagcagacacaggaacaaatcacgaaagagcgggccaatctgacaacgcagctgaaaaacgtggagaagctgaacggagaaagcgagtcgctcacagcgaaagcgaaaacggaagaggaagacattacgcacgcttatcaaacgcttcaaaccgtttaccatatggtctgtgaaacggaacgttcactgaaagccgcagccgaacgggctgacaaaacgcaagccgatctccgcaggcgctcagaggaagcgagaacggctgcattaacaaaagaattatcggaaaaactaatcgaaggaaagccttgtcctgtatgcggctcgacgcagcatgaccgcccgcgttccgctcatgaaacattctcgcctgatacggctgtacaggaacagttgcagcaggttgaagcgctgctttctgaggcggcggctctttctcaggaagtgctgacagccaaggttgcattagaagaacagtcggggcgttttaccgaagaatgtccgtttctgcaaagcgtccgggttccggagctggaagccgcttcctccatcagcggacgcccgcttgatgaagcgttcagcgccgtccgcttggaatggaaacaaatgaaacaggatatgctgtcggtaaaagagaaggtcacaagactgatcagcgcgcatcagcagacggtgaaacaagctgagcagcttgccgaacgaatccgctacgaggaaaaagaagccggccgtctcagacattcattagaagagcttgaatcgctgtcagaaagccgattgaatcagtacaacgaagtctgcggtgatattccgccaaaccggattgacgcctggcaggcttcgatagatgagaaggacaggcaggcagaagaatgtgagaagcgcattgaaacaagcatcgcattcctcaaggaacatgaagaggagaaagaacgcctgcaggagatgaagcatcggcttgaacgggaacggctcgagcttcactatgcgtctgagcgcctgcagcaggtgattgacggatatgaacaagagctcggaacagcagccgaagaaacatcaatttccgcaaagcttgaagcggtgcggcaggaattacagctgttaaaatccaaagaacagtccctattcgacgcgctgaagcaggcgcagcaatcactgaatgacgcaaaaggccgggaatccgggagtctcatgtcactcagggatgctgagacctcccttgagaaagcgcaaaacgactggcgcgtgaggtcaaaagacaccgggtttgccgacccggaccaagtcaaaaaaagtctgcttccgcaagggcgtgcagaggaaatgaaaaaagaaatagatgagttcttggacacctcaaaacagctatcggcaaatatcagccgtgttactgataaattagccgagcgccggatatcggaggaagaatggacagcatccgtttctctgctgaagcaggcagaggctgagtcaggcgccgccatggaggaaaaaggagcacaggcaaaagccttcgcggttatgcaaaaacagcataagcgctttaaagagattgaagccgaactgaaaagctggcagacacagattgacaggcttgataagctccagtctgtatgtaaaggcaatacattcgtcgaatttttagcggaagaacagctggaaagcgtggctcgagacgcctctgcccgtctcggagctttgacaaggcagcggtatgccatattagtcgattcagaaggcggtttcgtcatgcgtgatgacgcgaacggaggcgtcaaacggcccgtatcaagcctttccggcggagagacgtttctgacatcgctgtcgcttgcgcttgccttgtccgcccagattcagctgcgggggcaatacccgctgcaattctttttcttagatgaaggatttgggactcttgaccaagggctcttagacaccgttgtcacagcgctcgaaaagctgcaatcggacaacttatccgtcggagtgatcagccatgtgcaggagctgagagcgcgtctgccgaaaaaattaatcgttcatccgtccgaaccgggcgggaaaggcacccgggtcaccttggagatcatgtagaaaggagaaggaatcatggccgattctgccgagggcacatgtgaattatgcggccgccatcatgtgcggctgacggagcaccacttaacgcctaaggaagaaggcgggacattccttccgaccgcaatgctctgcatcccttgtcataaacaggttcacgcgctctatacgaatcaggagcttgcggcaaggctcacgggaatagaagagctgcgtcgtgacccgaaactcgcgcggtttgtgaaatggatcagaaaacagccgccggaaaagcttgtaaaaacaaaaaaagcaaatgaacgaaaataacgctgaaacaaaagcagccctcttctgaaagagcggctgctttttaggcgtttccgaccacattttgatcgctgacatcggggtctatatagtttgtcgcattgacaacgttgtttaataacaggaaatctccggtattgcctgctcccgaaccgagcgcagatttagaagagctttttggagaaaggtaaaaggaatcaccaaagtttacgactccgcccgatatggaattgatagctataggtccggtaattgctggcataaacgacaccctttatagaagtctcatcgtcattatatgtcagggctgctgtgattgtgagcttggcgtgaagatctgcctaatatgtttcagccgcgaatctcccagaacgatcgacgtcgatccgatttgaaccacggacgctgacgataccccttgaactttcacattccttacccgaattgaagggttttcatggcagaatgcgctttggactcccgtttccggtaacggcatgacggccggctgccgaaaaatctggtattcttttttgttaaatgagccttcatcatctctgtatacagcaagactacgctgatcggccaatactttgatccgcatattgatttcatttgtatcgcctgcttgaaagacactcgcaatcccgactgaattgattttggcgttccggaggcgtgaaatgcgctttaacattattccggcgccagcggcacataaggcccgataataagagattccggaggcgtgtcaaagatggaagacagatagacggaatcggtgtcgccgattaataataaggaagaactggatacaccggtagaccggatgtcgccgacttcaatattccggttaatcactgtaaaaatcatgacggatcatcacctttcatttcaccaggtatgtgcttaataaagtgctcgacggccctgacaatatcacgcttcacatgttcggcaatctgctcggcatattgcgcgggcgccgtattttcttctttcgggacatgggacagataatactgaatccggctgtccatctgctttctgatatcttcaataatatgatatttgttcgtttcgtccagcctgctctcatactgagtttcgagctgttctaaaagcgcggggatttcttcattcaggtacatatcgacgttttggcggatttgctgcatttgctggcccgcctgttcctgctgcatcattccgacctgcggagatgtctggccgacttcgaagttttgcacggcattcggatcagtcggattcaatccgatattcagcgttccttccagccgttcaattttcagctgatcaaatttatactcgagccgatcgattcttgtagaaggctgctgcttcagcgttgaaatttcattttggaattctttcatctgccgttcgagctcctgaatctgctgcgcctgctgctggacgaaagaatttaaattctgcaggtaggatgaaacggattgatcatacatgacattcacctcgcgtttcgtttccttcattaaaactaccggcttggcggctggagcggtacaaatgatgaggtgccgggacccccccctgttgttacagtctgctgccccgcggtgacaggcggcgccggctcaacataactccctgtgttgtacagattggaaagagatttaattgaaccggcgcttccgatttgcagtatggaggaattgctgacagattctacacgcatgtaattgatatggatcgactgattgacgtaaaaattcatacggcgcctcctttatgcgtttcctgccatcggctgatcgattacatcattatcgtacacattcgttgaattcctgtaattcgtcagtgtgagattgtctccggtattgaagctgcccgctccggcaaatgtcttaacctctgcttttggagaaatggtgatgcagtcgcctatatgaacgactccgctcgtaccgacggcattaattttaaacgctccgacaattgcgggcatacgagcacatccttttcgtgaagattttcatgactgcactccaggagcttatctgggctgcctgcctaaaatagcttatgacaaatgcacatttttgtgagcggaaaaaactttagacgtaaaaacaccggcgctttacgcatgccgggtcttatacataaatgatacagatttatatacatatcacgtttatgagaaagcctctttttttcctgcggtgcggccgtgctcaatctgtgcggccgggttcagcccgctgtctttcgtttgttggatgagcccgccccggcacccgtttaaaaggctgtccagctcctggctgcacctgatggtctccgtcgcattgattccgaatttttgcgctgtctcgaataaagttaatcttttttcttcaattttgttcatcgtgtgatctccaattctcgattattttggaaaacataggatgataatagtataacccattttggccaagaaggttttatttcgtcaatatgactaaaaaagtgacaatttttgatactcttttacacttattttcagcctgtttaaaagaggaatttcccgcccggaggaagaatacataaaggaatgccagatttaaaaatgatgggggattaacatgaaatttgcgacaggggaactgaacagccgaaaatttgtcggtctgatcattgatgatgacaaaatcttagatctgcaaaaggctgaaaaaaaattgtttgaacttgagacgattccgggttcgctgatcgagtgcattcaaaaaggagataagtttgtcgcgcatgccggacagcttgcggaatgggcgaaaaaaccgaatgacgagtcgggttcatttatgtatgcgctgtctgacgtaaagctttgcgcgcctattccgagaccttcaaagaacgtgatctgcatcgggaaaaattatcgtgatcatgccgttgaaatggggagtgaggcggatataccggagcatcccatggtttttacgaaagcccccgctgccgttacaggacacggagaaacagtggacagccacttggacgtaacggagcagcttgattatgaaggggagcttgcggtaatcatatctaaaagcggatcgcacatctcgaaagaacatgcgcttgatcatatattcggctatacaattgtaaacgatataacagcgcgcgatttgcagaagaaacataaacagttttttatcggcaaaagcctcgatacgacatgcccgatgggcccggtcattgtacataagtcggccgtcagtgatccgcaaagcctgaaagttgaaacgcgggtgaacggagaactgcgccaatcaggatcaacgggtgacatgatttttccgatagctgaattaatcgaaacgctgtcaaaagggatgacgcttgaagccggtgacattatagcgacggggacgccgtccggtgtcggaaaagggtttaagccgccgaaatttttaaagccgggggaccgcattgacattacaattgaaccgatcggcacgctgtcgaaccaaatcggataattgtgtgtctttcgcacgattgataatgctccgatcggcttgttgtggtaccataagtgaggcagattgatctgatagggggaattgaacataatgacacattggcatattacttcatgggtcgttgcgcttatcctggtgtttgtcagctacgggctgtacggttccggaaaagcgaagggcgcaaaaattacgcatatgattctgcgcttattctacattattattattctgaccggagctgagctttttgtccgttttgcgaattggaacggagagtacgccggaaaaatgctgctcggcatcattaccatcggactgatggaaatgctcgtcatccgcaagaaaaaaggcaaatcaaccggcggactgtggatcggttttattatcgtgctcgtcctgacagtgctgctcggccttcacttgccgatcggctttcacgtattttaatcaatcgcttgaaaaacccggatgcatccgggtttttttagttgcgcatacattctgcgcaactgtgccgctgaatgagaaatgccgtgacagggggatgttgatgaggcgaaggagatttgcaggatgccaaaagcgtcaatcactcttgctaccgcaaaagctacggctgtgaagggtcaaagcaaacgccgggcgtcaatcagcgtgaaaaacaaagctaaatacatcaggaggcacctatttaaaaggtgccgcctgtttgttacgcggtgccgtcttgtcttgccgctgaatacataatggagcgccgcccgtcagatgccgtccattcaaatctgtcgtgtttacccgagctgccgcggtgatgctgcagggcgcattgtgcgtcatccgccgagaagtgataaaacgaaacgccttcaccggaaaacagcgcctgattgtaggaaaatacgcaatcatatacagacaggccgaacccgtgcagatggctgagaaacagcaggaacgtttcatcgtccagcgaatcgagcaaggttaacagcggccgtttgaccgccttttcataacggatttcttccccgccgagcagggggatggtgtctgcaccgatttcggccgcgccgccgcaaatccgtgccggctgccatctgccgtcgcgtttcatcaatacgtctgcgtttcctagactgtctgcaagcaggatatcgccttcatcgttttcgatgaggcagatgccgtcctctatcatcagggtgccgcgcccccatttgtttttttctgagaaaagctgttttcgtttcataaccgtgccggtctcctttgtttgtttcttctcttccgttctttccaaatcgggcttgtctcatacaactcttagtgggacaaatcaactatctgcgtttctttgcataaactgggtaaagtgctgatagaaacgaatttgataccgacagaaacgggattggagctgatatcacatgtgtggaattgcgggttgggtcgattttcaaaagcagctcgtccaagagaaacatattatgaacaatatgatagacactctttcaaaacgagggcctgatgattcaaacgtctggggagagccccatgttttattcggacataaaagactttcggtcgttgacattgaaggcggccgccagccgatggcctgcacgcatcaagaggaaacgtacaccatcatttataatggcgagctgtataacacggaggaattgcggaaggagcttcaggcgaggggccaccgttttgagaggacctctgatacagaagtgctgctgcacagctatattgagtggcgggaggagtgcgtggaccgcttgaacggtattttcgcttttgccatctgggatgaaaagcgcaagcggctgttcggggcaagagaccggctcggcgtcaaaccgtttttttataaagaacacggctcttcctttctgtttgggtcggaattgaaagccatccttgctcatcctgatgtgaaagcccgcacagacagcggcggacttgcggaagtattcggactcgggccgtccagaactccgggctgcggggtgtttaaaggaattcacgaggtgcgtcccgcccatgcgttcactttctcaaaggacggtttgtccatatggcgttattggaatgtaaagagcgaaaagcatacagacagcttcgatgaaaccgcagctcacattcggtacttatttcaggatgcagtgacacgccagctcgtatctgacgtgccggtttgcacgtttttatcaggggggcttgattcgagcgcgataaccgcgatagccgcggctcattttgagaaacaaggcagagatccccttcatacttattcaattgattatgaggagaacagcaaattttttaaagcgagcgcctttcagccgaatgatgacggcccgtggatcgataaaatgacaaatgcattcggcacacagcatcataagtgcgtgattacgcaggatcagctgattgaacatctggaggaatccgttctcgtcagagacctgccgggcatggctgatgttgattcatcgctattatggttctgccgggaaattaaaaaagattttgtcgtgagcctttccggagaatgtgcggacgaaattttcggcggatatccgtggtttcacacagcggcagaagaagagggatttccttggatgaggtcgactgaggagagggtcacgctcttggatgaaaagtggcaaaaacggctgaatcttagagaatacgtgaatgcgagatatgaagaaaccattgcggaaacgccgctgttagatggtgagacgggaacagataaagcgagacggcagctgttctacttaaatatgctttggtttatgacaaatctgctcgaccgcaaagatcgcatgagcatgggcgcaagtcttgaagtacgggtgccgttcgccgaccacagacttgtggaatacgtttggaatattccttgggaaatgaaaatgcatggcagccgggaaaaaggtatcttgcggaaagcgcttgaaggactgcttcctgaagatattttgtaccgcaaaaaaagtccttatccgaaaacgcatcacccgaaatacacgcagggggtcacagaatggctgaaaacgattttacaacagaaagattccgtgcttcacaccctgcttgacagaaagaagctggaaatgctgctggagacagaaggttcatcttttcaggttccgtggttcggccagctgatgaaaggcccgcagctgatcgcccatcttgcccagatccatacatggtttgaggcgtaccgtatcgatatagaagaataacagtgccgcgaccggtttccgctgaaggatatcggtctttttattgtgaaacatatggtacactaaaaaacagaggagtgataccatgaccgaatacgaaacatgcgcccagcttgccgaggcgcactttcctttatataaacggactttctcatccctgccgccaaaaaacaggcgggccgcatgggcggtgcttgctttgtttcacgaagctgaccggcttgatgtgcaggaacttggaggatttgaacaggcggcacaagacgttctgaacgggtcacgcgccgacggctttttgtgggaggcgctcaccgatgtgcggcagcaatttgcgcttgaagaagagccgttacgtgagtttatcgccggccaaatctctgacagagaaaaagtaacgtatcaagagtttgatgacctgctgatgtatgcgggccaaacaggcggagccctcggcctgctgctgctgccggtttgtgcgcgccggaaccaagagaaactccgccatgcagccgtttcattaggagcagccattcagctgacccgggtgcttctggaggtccatacggacgagcgggcgaaaaagcgtctcccgcgccaggtgatgaagcaattcggctatacggaagaagagctggagagccataccgtcaacaaagcttttatgaatgtatgggagtacatcgcattcgaggccgaggcgtatttcgaggaggcgtctgaagagctggagctgtttccgttatactcaaggcccgccgttaccggtttgctggcacattaccgatcagagctcggtgacatgagacaacagctttcgcaagcataaaaaacgcccggcttcataacgaagcttcgggcgtttatgcaatccctttttgaatccaaatccgcgaccgccatcttctgtacataagaatgcctctgacccattcatccgcgataaatgaaatccagatgcccataagccctaatccgaaatggatgccgaacagataagcgagcggcagaccgataccccacatggaaatcatcgccatgtagacgggaaattttgcatctccggcagcccgcagcgagttgatgataatgacattaaatgaacggccgggctcaagaatgatcgtcatggcgatcagcatgctcgccgtcgcaattatgtcagggctgcttgtgaaaattccgatcagctgctttgaaaacaaggtcatgatcacggatgtcaaagcggcaatgccaagcgcccagtacagacttttcatgcagcggtcataagcgtcgtcaaaccgtttggcgccgatatatctgccgatcaaaatctgtgtgccctggctgatcgccgttccgaacagcaggataaacatggtgatgttttgtgtataaacctttgttgtaagtgcctgagcgcccataatggcgataaaataagtgacaaccatttgcgaaatgttgtaagacagctgttcgccggcagacggaatcccgattttcaggagttttcgcaagtgctctttatggacgtgaaaaatcttttgccatgtcagaccgagtccgatgcgttttttaacgatcacaatcatcgcgaacagcccgatgatccgcgcgaaggacgttgacatcgcaacaccggcgacgcctaacaccggaaggccgagcggcccgaaaatgacaagaaagtttccggcaatatttaaaatattcatcccgatcgtaacgaacatcgtatccttcgtatgaccgtagctttttaaaatggcgctgaacgtcataatcaaagcctgaatgaaggacagcccgccgaccacctgcaaaaagactttggcatccggcatcaattcattggaaagacccatcacatgaagcagcggaacggccgcaaaaaatatggcggcgctgatggcgagactgatgacaaagttcgctcctattgatacataagccacttcctgcgcctcttttttctgtttagatcctaaaaactgtgaaatcacaattgtcgtgcccgttgcgataaagctgaacatcacgataattaaatttaaaatctgattgctgacacccacggccgccacactgttgtcagagtattggctaagcataagagtgtcggcgtttcccataaacatatataatgaaacctcaataaatatcggccaagtcagcgcgtataatgagagtttgtgatcagaggattgtttgaacgcagcccgttttaaaatcgcttgtttcatttcttttaacccctttcctgacaaaatcaacgtttaaaagtgtacctccattttcttataataaaaagggagagaaacgaaacttcttgcaaaaatccgacttaaaaaggagggccgaaaatatgtcctttctcgagttcacagttcctccgttcccggtctttatcgctgcgggagaaggagtgttcaaaaaaggcgaaacccatgtgagacgggtcttcccggtgtttgatctgctatatgtgaaagaaggcgtcctctacattacagaagacgaaaacgccttttccgttgaagcgggagaatatattctgctttctcccgggcttgaacattacgggacaaaaggcagtgaagaaacgacatcctattcgtggcttcattttgagggagcggcttatgaggtgacggaaacaaccgggaacaattggtcggagctgaggcgaaaaaaagggagctttgaagagccgtcccgctaccgcctgtccctgccgcaaaaagggaaggtgagacgcccgcagtttatggccgggcaattcagtgtgctgacagatgacagcgccgagaactccgatctgccgctcagaaagcagattctgtttgaagagctgctgctccatcttcagaaagaagcgttccaaatcccgtccgcaaaggaaagagtcgcatgggaggccgcccggtacctgcaggagcactatcaggagaaaacaaccatcaaagcgctctcttcggctcttcattacaaccaagactacgtgacccgctgtatgcagcaggtgctcggcgtcacgcccggccagtatacgaacaaagtcagaatgacggaggcgaaacgtcttttgtccgcaaccaatgacaaaatgggggcgatcgcggacgccatcggtatggaggacccaacctatttttccaaactgtttaaacagattgaaggcatttcgccgcttgaataccgcaaattcgtaagccggaaaacggactgacctaaaaccagagaacaaaagagggatcagtaagccatgaaaatgacaatttacgatgtggccgaaaaagcgggcgtctccagctatatcggattatgatagattcgaagtaaaaaagcaaaggcccgggaggcctttgcttttttatgattcgtatgagaaaaaaatgtagtcagtcggcacgcctttatagcccatttggtgaagcatcgcggtgatattgccgcgatggtatgtgccgtgattcacaacatgccggatcacatcggcatatgtcgtctgaagcgtccccaggcgcggatgagaaatagagatcggaccttccgggttctccatttcttttaaaaattcgctgaattctttgtccagttcagtcattctatgttcaaccgcctcaaaatctccgtcaagcttttcaaattgatcaaactgcgagacgatttgttcgaaagtttctccgtaaagcacgtgaagccaaatgtaatcagcccggtatatatgcacaagcacggcgttcacagtcggaaaaacacttttcagtttctgctgtaagctgaccgcgggcagcgtcttcagatgctgaataacttgctcatttgcccatctgtggtagtgatacagctttaaaatgtctgacattccaattccccctcttcttccggtacattcaacatggcctggccgaattccttttatcgaaacaaaagcgccgcaaaataaaaagcagcaccccacatcaccaatgccgagcatttattcaggatgccgaggagccggcctcctgtatccgccgtttgaacgagccgtcccgcgaacgccagtccggcgaaccatacccaggaaaccgcgatacaagcaccggcaaacagccatttatcaattcccggataggcggcggagcttgtgccgatgacactgacggtatccaaaatcgcatgcgggttcaaaagggataccatggcggccgtgaccgcctgtttttttgccgagaaaaccgtttttttcgcctgttcggcctgcggtttgcttctccaagtctgccagcctaaaaaactgagaaacaaaaagccgcctataagcatgacggtctgaaaaacgggaatctctgcaataatcattgacatgcctgcgacggccgcgctgatgagaatcgtatcgcataccgcggcggcaatcactgcgggaaatgcctgccacacatgtttttgccaggctccctgctgaaaaataaacacgttttgcgcgcccaatggcaaaataaggccaaaagcgagcatcactccgtgaagaatggcattcatatcgtaaaaccctccaatcgtcaactaaatctcattgtagccgcactgtgtgctgatgtctccggccatttggctggtacttgaaccagccaaatgtataataaataaagaaggagggatgacgtatgaacagctggcgtccggatcgggagtcgcacataccgctttatctccagatcgaacagcatataaaagaaaaaatacttcatggcgaatggaccattggcacgaaaattccctcacaaagaaagctcgccgaggagcttcaggtcaaccgaagcacagtgacggcagcagttgatgagttaatcgcccaaggtcttctggaaggaaaaagagggggaggcacaaaggtcgtcaacaatacgtggagcatcatggcagcggctaagccccttgattggagcacatacgttacatcggggagtcatcagccgaattcatccttgattcaggccattaatcaaaacgagccgcgtccggatctgatcaggctggggacgggtgaactgagtcaagagctgctgcctgagcaggagatggccgaactgttccgtgaagcgggaactaacatttttgcgctcggctatgaagaaccgaagggcagcctgcagcttcggcaaagcgtcgcggaacatttgaaaacaaaggggattcacgcgtccccggcatccatcgtaatcgtctcaggcgcgctgcaggcgcttcagctcatttcaatcgggctgctaaaaccaaactccgtcatgctgactgaaaacccgtcgtatctccattccctgcgtgtgtttcaatcagcgggcgtcaggcttaagggagtgccgatggatgggagcggaatcaaaacggatcatcttcccgcttaccggcggcaatacgaagcagggctgctgtacaccattccgtcattccataatccgacgggaacggtgatgtcactcaagcggaggaaggaactcatcgtcctcacaagaaatcaccgcctgcctgtcattgaagatgacgcatacggtgatctatggatcgataaagaaccgccgcctccgttaaaatccatggacggtgaggggaatgtactgtatatcggcacgctgtcaaaaaccgtaagcccgggtctgcgcatcggatgggtcgtcgcccctgagccggttgcagacaggctcgccgatattaaaatgcagacggattacggctccagtgctttatctcaatgggcggcatgtcaatggctgtcaagcggccgctatgaagcgcgccttttgcgtctcagaaaggaactcaaaatcagaagagatgcggcattgcgttttcttaagagatacgcgggagatattgcggagtggcgtgtgccggaggggggcttttatatttgggtcacttttcatcaagcaatcgccgttcagacgcttttcacccgtgccttggaggccggcgtgctgatcaatccgggagctctctatcttcccgaagaccggcaaagcctgcgtctttcctattcatacgcatccttaccggacttggaaaaaggcattcaaacgatagcggacatcgcccgccgtttcgtttaataaaagatcacgtcacaatggctccgagcgcttctgcgaatgtaacggcatgcgccggagagatgcggcatcctttcagcttctcaagtgagacgtgcaggtgatcaaatgtgcacgtgctgatatccatattaaaaagagacgtgccgataaaatttgagctgttcaaatcacaggcgtcaagatctgtgtattcaagaaccgcatcattccactcgctttctgtaagagcgcacgtgtcaaaccggacatgcttcatattggaatagctgaaggagctgtaatttgcgaggcagtcttcaaaccgtacatgacgcatggcggaatccgccagattcaagccgagaatttttgaatgctgaaccgccgttctatggatgatgcttccgctgaaatcagcgtttgagacatcacatttgtcaaacaggacatccgtacattccatatgtctgaaagagacatccgtaaaaacggtgtttctgaaaatgactttttcggcgcgcaggccgtccagtttgctgtttaccacggcgttttctatgacgacttcttttatgaggtcgtcctgaagcgcttctgtgaaagaaagcaccggcaattctttcgggattttcggtttttggatcgtattcatctcatacttccttttctgaattaatagctgaaaacggcaattgacagatatcgttctgcctgccatccttgctgttgtgtaatgtacaaagggtattaaaaaagcgggagggcgtcaatagtaccgcatataaaagcaggcgtgacattcaaggtaatgcccttagagacatgtccccaagggcatttgtctgtttcaggcgagttctttatacatgatcacatgcgggccgatgccgggtatgtcaaaggggctgcccgtgcttttccagccgagcttttcgtaatatccctttacgtgacatctggcgttgcaccagacaagcgccgcccccatatctgccagttttcgttctgcataggcgattaacgtgcttcccgctttttgcgtccggtattcctcaagcgtcgccatgccgcgcagctggtaggcgggcgctgcctgtaacgcctgctggttctgcgggtagaaagaagcgatgctgatcaatgtcccgtcgtaaaaacctccgagatgaaaggctcctttgacgctgtcctgatcatatttacaatcctcaatcgtctgatgggggcgcagcacgctgtgtctgatcgcgtatgtgtcttctgcggtgatgggttttacttcaaccatgaaaaaatcctcctttgcttgattctttttctgtatcgtaccatgaaaaagccgcctgtcatatcaggcggcctcttccgcgtcaatgcaaatatacatcagcccgcttttcatccttttgcttaatataagctgcaagctctgacgtcaaatcagaacggagaaacggggtgattaaataaattccgttaaacagttcgcacgccgtgtcgagaagcgacttggcgatggcgaggccttcggctttctgcttccgcttgtcttcgccggcgagcgccattttttcgcggatgctgtctgacagcttaatgcccgggatttcatgatggatgaactctgcgttgcggctgctcgttaacggcatgattccgatatacaccggtgttttgagatgcttcgtttcatgatgaatgtcaatgagctgctgctccgagtagacaggctgggacacgaagtagtcagctccgcactcgatttttttctccagccgttttactgctttatcgagatggcggacattcggattaaatgctccggctacggaaaagttcgttttcttgccgagcggtttccctgataaagaaatgccctcgttgaattgtttaatcagcctgatcaagtcaaaggacgttaaatcatagacggaggtagcccctggaaagtcgccgatttttgaaggatcacccgtgatggctaaaatgtcggtgagcccgagcgtatccagccccattaaatgtgactgaaggccgatgatgttgcggtctctgcatgtaatgtgaacgagagaacggatatcaaggcgctctttcagcaatgaaccgcaggctgcattgctgatccgcggtgtcgccaatgaattgtcggcgagcgtcagcgcttctatgccggtttcttttaattcagccgccgcttgcagaaatttgtcaaaattcaattttttcggcggatcaagctctacgataattgaccgtttttgagcggcgatttcgtttaaacccggttcgattcgttcgttgctgactgagatgacttcttcttcccgtctgattttcacttctttctcagtgacgggggaaaggccgcggaccgcttcagccatggctctgatatggtttggcgtcgtaccgcagcagccgccgataatgcgcgcgccctgagtgcggaactgtacggcgctctcccggaaataggcatcgtccgtatcataaacaagccggccttcttctaaagacggaaggctgctgttcggatagaccgataaataagcgtcactgaaaatcggcacttcggtgagcgcttcaatcatgtggtacgggccgagccggcaattgattcccgttatgtcagcgccgagatcggcaatggacctgagggcttcccgaagcggcgttccgtcctgcagcacgccctgttcgtgcatggatacgttcagcataatcggaagttccgtttcttttctcgcgatcttcagcacttcgcgcgcctcttctaaatcatagtatgtttccagaagcagaccgtccggctcttcgtgcagcaataaataaagctgctcccgaaagctgcgtttaatctcctccaggctgtaggcgtttttgttaaaggtgcggatgccgcccatcgttcccaatacataagcgccgtctgaggaagcgcgcgcgattctgaccgcctcctgattgatttttttcgtttcgtcctcaagtccgtatcttgagagcttaataaaattcgcgccgtacgtatttgtctggatgatgtctgccccggcttccacgtaagccttatgtatccgcttgatctcttcgggctttgatacgttcagttcctcaaaacatctgtcaatgccgtaggaatagaggagagtgcccatcgcgccgtctccgattaaaatccgttcttttaagtcttgtaatagtcccattgtttgcctccttcgtcacattcagcaaggaaaaaagagaaataaaaaaagtcttcttaagaagaagactttgtaatcatttgtctctcttcttatcttccaagctgtttttagcttgctggatttagcaccttggtcatggtttgggtaaaccactacaccggttgctgaagcgtcgtcgggccagtccctcggcttctcttgataagaacgttcatgtaattgtcatgggtttccaaaacttaactgtgaaaatccctttctccaaatttaccgaaaatagagacaataatcaataggaatcacataatttatctaaaattaataaattgaacgtcaatcggcaggtctgctccgcggacggctgcaataatctgctgcagatcatctttattttttccggtgacgcgcacttggtcgtcctgaatctgcgacttgaccttcaagccggagtttttaatcaccgcgttgatttttttggcgttgtctttatcaatgccctgtacaagcttcgcacgctggcgcaccgtgcctcccgatgcattttcgattttgccgtattcaatgtttttcgtcggcacgtcccgtttgatcagcttgccgctcagcacatctttgagctgattcagtttaaactcgtcatcagaaatcaggacaagttcttccttttctaaagttacatcgcttttcgatcctttaaagtcatagcgcgtgccgatttctttcagcgtcatctgaatcgcattctgcacttcgggaaattcaactttggatacaatatcaaaagaactttcttttgccatgagaaaacctcctataacatttcacttatgagttgattatagtagaataaagagaaatgtccaacagcataaagcatgaatttatgcatattggaaaaaatgagaaaaacatcagcctcatacgggcgaatcaggaaggacgataacatgagaccagggcagcagctcacgcttagtatagatcaccaaaccgatttcggttattttttaaccgacggcgaggatacggttcttttacataacagtgaaatcacagaggatatcgaagacagagatgaagtggacgtatttatttacgtcgatcatcaggaaagactcgcggcgacgatgaaaaagccgctcatcagcttttatgactacggatgggtggaagtgacggacgctgtggaagatatgggcgtattcgtcgacgtcggtctgtcaaaagacgcgctcgtcgcaacggagcacctgcctccgtacaaatccgtctggccgcaaaaaggagacagactgtattgcatgctgaaggtgacaagccgcgggcgcatgtttgccaagccggcgcctgaggatatcatcagtgaattatttacggatgcaggggaagacgtcatgaataaagacctgacgggcacggtgtacagactgattgcatcaggctcttttctgattaccgatgaaggcatccgcgcgtttattcacccttcagaaagaaaagaagagccgagactcggcagccgcgtgacagggcgtgtcatcgaggtgaaggaagacggctccgtcaacatgtccctgctgccgagaaagcaggatgcgctttcggttgacgcggaagaaattctgacctatctgagatcaagaaacggcgcgatgccttacggagacaaaagccatcctgacgatatccgcgaacggtttcatttaagcaaagccgcctttaagcgggcgctcgggcatctgatgaaaaacggcaaggtctatcaggaagacggctggacatacgaaaaacaataaattttctgcaaaaacatcggtgaaccaaaaccgatgttttttattttctcaaaagctcctataccctcatttgtttaacatcctgccgaacatacatattttattgaaataaaatattctgacatccgaaccgatatataactgtagaaaaaaacaaaaggagagtttcaatgagaaaaatggcgatatttgcggctgtactgctgcttgcgctcagcacggcgggatgtgccggcaaatctgaggaaacggcggccgaaaaaacgaaaacaatcggcatcatgctgacagacaacggcctcggcgaccaatcatttaatgattcaggctttcaaggtttgatgaaagcgagagacgagctcggcatcacatttgactatcgggaaataaaagacaccggtacatacgaaaaaggactgacccagcttgtccgggaaggcaatgaccttgttgtggggctcggttacagcatgcaggcggatttagaaaaggtcgctaaaaaatatccgaagcagcggtttgtgctgattgattccgtatcagacctggataatgtcacctccgtcacgtttaaagaggatgaaggaagcttcttagccggagcgctggcggccatgacgagcaaaaccggcacaatcggatttatcggcggttcagatgccgacgtcattaaacggtttaaaaaaggctatctgaaaggcgcggaatcagtcaaaccgaatatccgcgtgctgtcggacatcagcggtacgtttgatgatgataagctcgggaagggcatcgcccaaaacatgatccgaaaaaaagccgatgtcctgtttacggcggccggcttcacgggtgtcggcgcactgaaagaagcggaggcgcaaaaagtatacgccatcggtgttgacagcgatcaatattacaccgccgagcacgccgttatctcttctttagtgaaaaacgtcgaccatgtcatctatgaattggcgaaagatttaaaagacaacaaggagatcaaaagcggagagatcgtttacggactgaagaaaaacggcatggacttagctaagatcagagttgtcaaaaacgcaggcgggctgacgaaaaagatcacggatatgaaaaacagtctgattgaaaaaggaggcgatctgaagtgacattacggacaaggctgctcgttaacgcagccgttacgatgatttgcttcgccgccgtcatcggctttaccatcgtaaacatgatgaagattcaggcttcaaatgaagatgaagtggacgcgctgttaaacgttcaggaagcaaaagctgaccttaatacgttaaaagaaagcatcaccggctattcctatacgctcgcagacgcccagaaagaagatgtgcgaagctatatgaaaagcagctcagacaaactggcggcgctcaaaaaaacgatgacggacggtgcagacaaagccgcttatgacaaactcgccaaaaaatacgaatcatggcaggcggaggcggacgctgctcttgattcgaaaagcccggctgaagcgacaaggacggcggcccgcatcaacggtcttctgaatgatatttatatgctgaatctgaaaagccgggatcactatgaagacatgcagaagcagacggctgaccagattcagtttatcgtttacagcgcagccgtgctgaccatcgtgatacttgccgtcaccgtcatatcttccatcaggctgacgaagagaattgcagggccgatccgccgcatggctgaaaatgcccgtcgtattgcaggagggaaccttgctgttgaaatgcttgattataaagggaaggacgaactgaaagagctgaatgactcattcggaatgatggctgaacagctccgcaccttaattcaggcgatcggagaggtcggccgtgaagtcgagactttcgcggaaggtttgacgaaggaaaaccagacgctgaaggacatgaccgagcaggtgtccgtgtcgacggaagaaatggcgaaaggctcccaaaccatttcagaagatctgcagcatacggtgcaattcattgaacaaatggatgaacattcaaaggcgaacgccgaacgttcaaaacaaacgacgagaagcagcgaagagacgattgcggcggtggctgcggggcgcggtgctttagccgagaccaagcaagccattgataaaagcaatgagacatcaaaagagatttccgaagccgccgatctcttcatagagcatgcggcaggcatcagtatgatggcgcagaccgtttctgacattgcgggccagaccaatctgctgtcattaaacgccgcaatcgaggcggccagagcaggcgaggccggaaaaggatttgccgtcgttgccgaggagatacggaagctcgcagacggatcagccaaagcgaccgcgcagattttcgatatggtaaagcaaattgaagacggcatcacgtctattaccggagctgtcacgaccggcgtcgctttagcggacagacagcaggagctgatggagaaaacgtcagaatcattcgtccatattgaacaaaaagccgcccatattaaagcggagcttactcaattggacggacggatcatcgaatcgaaacagcttggtgagcaagtgctgcatcatgccgaaagcatcagcgccgttattcaggaaacggctgcgggaagcgaagagatttctgcctccgcgcttgagcagctgtcttcttttcataaaatggcggaaagcgtcgataatctggtgagcctgacagagcggttaaacgatcaggtccgccggtttactttgtaacgggcttatgcccgcccctgatttttgcagcctgtcatgagtaacttctgaatgaaacacaaatactgaatatacttgtgtttatatttattctttttcgtgaaaggtgaaaaaagatgggaggaatcgggatgaatgaacaaattccgcatgataagggtcttgataatagtctggctttattacgcgatggatatgtatttgtgaaaaacagagcggagaattatcgctcggatgtgtttcgcgcccgtttattagggaagacattcatttgtatgagcggagcggaagccgcaaagcttttttatgacacagaacgatttcagcgggagcatgccctccccaaacgggtgcagaaaacgttattcggaacaggggcaatccagtcaatggacggtgaacggcataagcacaggaagcttctatttatgtcgctgatgacgccgccccggcaaaaacggcttgcggaagcggtggcaaaacagtggaaagcatctgcggaaaagtgggagggttcaaaccgaattgtcctttttgatgaagcgaagaaagtgctgtgccgggctgcctgtgagtgggccggcgtcccgctgaaagactcagaagtgaaagagcgggcggaggatttcaccgatatggtagacgcattcggcgctgtcggaccgcgtcattggaaaggcagaagggcgaggctgaaaacggagaaatggatagaggaggtcattgaggatgtgcggtccggcaagctgcaaacgccggagtgctcagccttgtatgaaatggcttgtcatacagaacttgacgggaacagacttgattctcacatggctgctgttgagctgattaatgttctgcgcccgattgccgccatttcttacttcattacgttttcagctcttgcattgcatgattaccctgaatatcggggcaaactgggatcgagagatgatcaggaggctgaaagatttgcacatgaagttcggcggtattacccgtttgccccgtttttaggagccgttgtgaaaaaagatttcgtatggaagaactgtgagtttaaaaagggtgcatccgtcatgcttgacctatatgggacaaaccatgattcccggctttgggagaatccgaatgaatttcgcccggaacgttttcaggggcgggaggaaaataaatttgatttcattccccagggcggaggtgatccggctaacggccaccgctgtccgggtgagggaatgaccgtggaagtcatgaaaacttcccttgcgtttcttgccaatgaaatagagtacgatgttccgtcccaagatttgagcttcagcctgtccagaatgccggcattgcctgaaagcggattcgtgataagtgatgttagacgcatatagaacaaaaaacagccctctatcttcatccacaagagggctgttttgcttttacagatggtccggttttttggaattctggttttttcccgcctgccggtttttttcggcaagccggttctttttctgatttacggcgttattgtccaacggttttttgtcatcatctttcatgcggcaaagcctcccttctgtccgttaggatgcccgcccgcattgaaattatggcttcaggaaaaaaatcgcgagcgtgcccggcccggagtgcgcgccgatcgcagagccgattgaatgaagaatggtctctttcggatggaacgcttcttcaatcatttccttcatccgaagcgccgtctcctcgttatctgcatagctgatccccacggtttgatccgcccaatcgccgccttcttccttcatcatgtctataatccgtttaaacagtttcttctgtccgcgcaatttttcgagcggcacgagcctgccgtcatccacatgcagaatcggtttaatgttcaaaagccccccgacaaaagcggacgtttttgaaattctgccgccccgcgcgagataagcgacatcatcgaccgtaaatatatgtttcatccgtgcgcaaaagctctttacagacgtttcgatttcttgtattgtattcccgttaacacagagtgtttgcgcgtgcatcaccgcgaggccgcagcccaatgaagcgcatttggaatctacaatccgtaaatcaaaatcgggaaattcctcttttacttcattggcgatcattacggccgtctgataggtgccggaaagacctgaggaaaaggcgatgtatatcgccgggtctcccagttccgcgtattgtaaaaatactttttttatcgtatccggtgatgcctgggatgttttcggaactttcccgtcccgcatcgcttgaaatatatgatccgcctgaatggtgaccgtgtcctcatattcgtttccgtcaagtgttacgtgcagcggaatgaacccgatccggttttcttcaatataagatttcggcaggtcagaggcgctgtcagcaataaggtgaactgtcatcataattcccttctttccgattggtgagagtgatgccaactatatcatataaatgtggcaaaatagtgttcaaaactttattttaagggaaaagctaataatgaaaatgagcggaggagcaagccatggtactagaacaagcaaaaaaattagcaatcgtcgtcatcggcgcgtttctgtatgcggcgggactgaatttattcctgataccggcgaatgtatatgccagcggttttaccggtgtcgcccagctgctgtcaagcgtcgttgatcaatacgcccccttttatatttcgacaggagttctcatgttcctcttaaacattcccatcggtgtgttagggtggctgaaagtcggcagatcattcactgtatacagcatattaagcgtagcgctgacgtccgtctttatgggaattctcccggaaatgagactgtcgcacgatattcttctgaataccgtattcggaggagtcatctcagctatcggcatcggtttaacgctgaaattcggcgcttcgacaggcggtcttgatatcgtgtcgatggtgctggccaaatggaaggataagccggtcggcacatatttcttcattttgaacgggattatcattttgacggcaggattattgcaaggatgggagaaagcattatatacccttgtcgctctgtatgtcacaacaagggtgattgacgccattcacacccgccacatgaaactgaccgccatgatcgttacaaaaaaagccgatgaaatcaaagaagcgatttacgggaaaatggtccgcggcattacgacggtgccggcaaaaggcgcttacacaaacgaacagaaagaaatgatgatcatcgtcatcacgcggtacgaattgtatgaccttgagaaaatcgtgaaagaagtcgacccgaaagccttcacaaacatcgtgcaaacgacggggatctttggtttcttcagaaaagactgataggagcggatagaatgaagtggctgtttggcctgttattaccggtcattttactgatcggatgcagcagtcaatccgggcagaaggagcccgctgaggaggtatccggagagatgaatgaacagcaagcggaattagccgtaaaccctgtgcagacggatcagcagatcgaatttcagatgtctttaaaaaataagagcggcagcccgatcgatttcacattcagctcagggcagaaattcgaattgaccgtacatgaccaacatcacaaagaactgtaccgctattcaaaagacaaaatgtttactcaggcgtttcagactgtgaccttaatgccgaatgaaacgtatgacttttcagatgtgtggaagaacgtgcccggtccgggaacatacacggtgacggtgacgtttttagggaagtccgatcagatcggaaaaagactgaaaacggtaaaaacatttgaagtgaaataaaaaagcggcgccctcgtctaaacggggcgcctttttttattgcaatttctccagctgatcctgaaattggtgcagctgctgacgttctgcatccgtcgaattggcgtacgcggaagacacggcgtttttggcgcgtgagacagctttttcctgatcgccgtcctcgaaaccgttagcaatcatgacggcctgctggacaaatgacttggcttgagaaaacagttcgtttctcattaaaagtcaacctgcctttcagccgaatcttttgctgcatcatgctgtgcttcctctaatgtagaccgatatggaaatcttgcgtcatgaagactgacagagtccttgccttgctgaataaaccgttttgatttgtttcgtttacccattgcaatgtcccccttccatatttagacgagatgagtcgtctgttttagtatgggcggaaggctttgtgttatgagcggcaaaacctcacagggagaaataggattttaaaaattcggcgattccgtccgcttcatttgatcccgtgacgcggtcggcggcctgtttgacttcatccgtgccatttcccattgctacgccgcacccggcaaaccggagcatttcaagatcgttgtcttcgtcgccgaacgcgatgatccgttctctcggcacttggtaatagtcgctgattttcttcaggccgaccgctttattcatcccgtgtttaatgatttcaatcacatgccacggagccgcccatcttctgtggtcaatgacctcggcgtgcacatcggataaatgcgcgcgtatgtccgcgacgtcctcttccttcgcgtgaatcaatacggacgtcacatcctccttgaccgtttcacgcagatcgccgaatgtgacattcgccgtattcatatgaaacgcctcaattaaatgctcatcatgataatggaagtacacatcatcaatgacctcagcgagcacattatgtatttgataggtctctgtaagttcggcaagctgtctgaccaaatcgaccgataaagacgtgtggtagcgtccccatgattcgtctttcgggtggtggacaaatgccccgttaaaattgacaatcggcgttgtcagcccaagctcgtcataatacatcgaactggaacggaacgggcgcccggttgagatgcagacatgatggcccgcttctttcagcttctgaatcgtccgtgccgtttcaggggaaatggttttatcgtcttttaataaagttccatccagatctaaggcgatgagataaggttttgtctccataaataactccttttgtcatataatttgctgtttttcacttatgtacagtgtagctttttaccatctttattgtctacatgttacacttatgattatggttatcctaaggagggagtcaacgtgattcttattgatcatcaaaccgtatcaggcattccgtttttacatattgtaaaagaagaaaatcgggaccgtcccgctccccttgttttctttattcacggttttacaagcgcgaaggagcataatcttcatttcgcttacctgcttgctgaaaagggcttcagggccgtgctgccggaagctctttaccacggtgaacgcgctgaacagctgtcagcagaagagctcgccgtccatttttgggacattgtattaaatgaaatcgaggagcttgacgtgctgaaaaaggattttgaagcgcgcggtctgattgaagacgggcggatcggtcttgcgggcacgtcaatgggcggaattacgacattcggcgcgatggccgcgtatgattgggtcaaagccggcgtcagtctgatgggaagcccgaactatacggcattttttcagcagcagattgaccacattcaaaagcaggacatcgacattgacgtcacaaaagaacaggtcgatgaactgtttgcacggctcaaaccgttcgatctcagtctggaaccggaaaaactccgcagccgcccgctgctgttctggcacggcgttcaagacaaagtcgttccgtatgcaccgacccgcggcttttatgagacgattaaacctcattacagcagccggcctgaccatcttcagtttctgaaagacgaacgggctgatcataaagtcccgagatacgccgttttagaaaccgtcgcctggttcgataagcatttataaagcacaaaggtgttaacaaaacccgcttttacgttatactgaggaaaaaggagtgatggaacgtggaagaagcattaaaagaaaacatcatgggcgccttggagcaggttgttgaccctgagctcggcgtcgatatcgtcaatctcggccttgtatacgacgttgatatggatgacgacggcctgacgcatgttacgatgacactgacatcaatggggtgcccgctcgctccgatcatcgtcgacgaggtgaaaaaagcgctcgccgacattccggatgtaaaagagacggaggtccacatcgtctggaatccgccttggacaagagacaaaatgtcacgctacgcaaaaatcgcattagggattcagtaataagaaaatgcacctcggattttaggtacatcctaaagtttggaggtgcttttcttttgtctgcatttacaaggaaaaaatcaacgcggataagcgacagtgagggtttgttttggatcgcaaacaaacctttaaatataaaatttcatatgaggtttatcttttttgtaataggacagtctgtcttggagtgtacctgtgtggaattcaaatttatgtccatcgggatcagtaaaataaattgacttttgatcttgcttatccctaggacgcccatttaatatacttacatttagattttttagcctttgatgtattgcatcaaaatcttttgggtcaattgtaaaggccatatgcgtataagatttatgtatttcatttcttggtatatccgcctctaagttaagtgcaagccaaagcccgttcagatcaaaatatgctgtcttttgtcctttaaccaggagctgtgcatgaaatgctttttcataaaattctatagatttttccaaatttgaaacagaaaaaagaagatgattgattccttttatgtttattttccccacctcatttaacatgtttgtttgaaacaatccctttggtaatacatctgcatatatatcgattatatactgactaaaaaatcattttaaggatttctgtggatttttatgcccgatgttttccggctgaccgtttcgagctgtactaaacatgattctgtcgggcgccgttctgtctgctttgccgctgcagaccggcgtgcggaaagaacgcaagacactaaaaaaacccgagtttcccaccattcggggttttttgcggtatcgggttaaaaaggaaaaaaacggacgtgaggcatgatataatagaccggctgcatgcgagggaggaatccatgaagaaaaaattacttctcattatccttagcatccttgtttatacggcgctgttcgctgtttccgcttttcacaaagagccggagcagcaggcagggacaatgacggatgtcagccgtctcatgcccgtgaaaattaagcagacggtcaaaggaaaagagaaagaaacattggtcgaaacgattaaggaagccaagagaaagcacctgaagatctcaatcgcaggcgcccagcactcaatgggcggccagacgtattatgaagacggtatcgttctcgacatgacgggctacaacaaaatactcggtctcgaccgaaagaaaaaaatcatcagggtgcaggcgggagcgacgtggaatgatattcagcgctatgtcaatccgtacgggctcgcggtaaaagtcatgcaatcgcaaaacatttttacgatcggcggctcactgagcgccaacgcccacggccgggatatccggtacggttcgctgattgatacggtcaaatcgtttcatcttttaaaggcggacggcaaagtcatcaccgttactccgaaagatgacctgttttcagccgtcatcggcggctacggcctgttcggcgtcatcctggacgcggatattgagctgacggatgatgagctttatgaaatgaaaacgaaacgcatgaacgctgatacatacagtcaatattttgcgcagcatgttcggcgcaaccccgccgtgcgcatgcatctcgcgcggatcgcaacaggggataaaggctttttgcacgatatgtatgtgactgattacacactctcagacaatcagaaagaattaaagcggcacaatgaactgaaagaagatgagcatccggcgctgacgaaattcgcgctcggcctctcccgccggtatgactggggaagaaattggttctggtcaacccagcagtcttattttctcagacaaaacggtgtgaaagtctccaggaacaatgtcatgcggtcagaatcgaaatttttggaatatgaaaacacggacaacaccgatgtgctgcaagaatacttcgtgcccgtcggcgaatttgcgccgtacattcatgatttacgcaagacgctgtcacatgaagatctcaacctcgtaaatattacgatccgctacgtgcaaaaaaatgaaaaagccgatctgtcatacgcaaaggaagacatgttttcactcgttcttttaatcaatgaagggttttcaacagacagccaggcgagtgcggcgcggattgtcagaaaaatgacggatacggcattgcgccaccgcggcagttattatctcccgtatatgctgtatcaaacgaaagagcagatgcgtgaggcatatccgaaaagcgatatgttctttcagaaaaaacacaaatatgatccggatgacttgtttatgaattatttttatcagaggtacaaatcatgaaacacaaccatttaaaatggctgatcctgtcacagagcagtgtcttttttgccggcagcctgatctttccgttttatattttatttattaaaaacatcggttccagctacacgcaattcggtctctcatacggcttgttcggcgcattgattcatccgctgctcggccggctgtcggcaagactggattcccgctggttccttatggcaaattcgtgggggatggcggtgcttcttctgacgctcccgcacattaccggcgtgcaccaggtttatgttgtgcaggtgcttttgggcctgttcggcgcgatgcaaaaacacggcgagaaaatcatgatcgccgattacaccgacggcggggagcggggaaaaaaagtcggcagctatcatttctggacggccgtattttcagctgccgccattattctcggcgggtttctcgctgatttctttacggtttatattattttttacgccagctccgtgctgttttttataagcgggctgatgatgctgaaaaaaacaggctgatccgatcagcctgtttttcttatgccccctcgatcgagaggggggtttttgtcagcgaaaacagatggaaaatgaatgaaaaaatattaaatatacaattgaattaatttttattcatgttataatgttaaataatttcacaaaaaccaagaaggtgaacccgttgaaaataggtattataggcgcgactggttatggaggcgccgaacttgtcaggattcttaaccatcacccttatgcagaagattgtatattatattcatcgagcgacgaaggaaaagaatatgccgcttcatatccgcatttgaggaatatagcgtcacaatcacttcggccgcttcatatagaaacgatccgaaacgaaattgatgtcatgtttatagccgcgccgcccggcgtttccggagagtggtcgcccaagctggcggaggcgggcattccggtcattgatctatccggcgatctgcggattcaaaacccggccgtgtatgaaaagtggtataagcggaaggccgctccgaaaggaacgattcaaagcgcggtttacggtttagctgaactgcaaaaagaagagattcagactgcaaagctgattgccaatccgggatgttttccgacggctgtgctgctcgggctcgccccgctggcgaagaataagcttttacaagattcatttctgattgttgatgcgaaaacgggcgtatccggcgccggccgaaaagcatccatgggcactcattattctgagctgaatgataatttcaaaatttataaggttaatgagcatcagcatactccggaaattgaacagcaattagcggcttggcagcccggcacaggcccgatcacgttttccgcacatttggcgccgatgacaaggggcattatggcgacgatgtatacggaggctcccccgggtatgtctgctgcacaggtaagagaattgtattccgaattctacaaagattcatattttgtcagaatcaggccggaaggtgaatttccggcgacgaaagaggtatacggcagcaatttttgtgatatcagtgtcaccgtggatgaaagaacaaaccgtgccaccatcgtttctgtcatagataatctgatgaaaggcgccgcagggcaggcggttcaaaatttaaatatcatgaatggctggcaggaagaaacgggacttacgatgacgccagtctatccatagaacgaaagagggattcaaaaatatgattcagctgagtgaggaaatcacgaaaataaaaggcggcgtatcctcgccgaaagggtttgaggcaaagggcgtgcattgcggtctgcgctattcaaaaaaagatctcggagcgattatcagcgaagcgcctgcagtcagtgcagcggtatatacgcagagccattttcaggcagcgccgctgaaagtgacgcaagccagcctgaaaaaagagggtatgcttcaggcggttatcgtcaacagcgcgattgccaacgcctgtacgggagaccaaggattaaaggacgcctatgaaatgcgggacggcttcgcgagccagctcggcattgagccggagcttgttgcggtttcgtcaaccggggtgatcggcgagcttttagacatgaaaaaaattcaagcgggcattgaacagctcggtcaagcgccatccatgtccggagcatttgaagaagccattttgacgacggatacagtgacgaaacagacgtgttatgaactggtgatcggcggagacatcatcacgatcggcggagcggcgaaaggctccggcatgatccaccccaacatggcgacaatgctcggctttgtcacaacggacgcggccgtggaagaacaggcgctcaaaaacgcgctcagagagattacggatgtttcatttaaccaaatcaccgttgacggagaaacatcgacgaatgacatggtgcttgtgatggcaaacggctgcgcggggaatgattgcctgacggagcagcaccctgactggccggcttttaaaaagggattaaagcttgtatgcgaagaccttgccaaagatatagccagagacggtgaaggagcgacgaaattaattgaagccagagtcgaaggcgcgaaaaataaccttgaggcgaatattattgccaaaaaaatcgtcggctcaagccttgtgaagaccgccgtttacggcacagacgccaactgggggcgcatcatcggcgcaatcgggcacagtgcggcaagcgtaacggccgaacaagtggaagttttcctcggcggccagtgtctgtttaaacacaacgaacctcagccgttttcggaaactgatgccaaggagtacttatcaggtgatgagattacgattgcagtccgcctgcaggaaggctccggcagcggccgggcatggggctgtgacttaacctatgattatatcaaaatcaatgcgagctatcgcacataacaaaggggagcggcatgaagaaaacgatcgtttttaagtgcggcggcagcgtaatccgcgagttatccgccgatttttttcaaaatgtaaaagagcttatgcaatcgggctggaacattgccgtcgtccatggaggcggcccggacatttcaaaaatgctgaaaacattgcagattgaaacggaatttgtcgatggacagcggaaaacgaccaaaccggtgctggaaacagcggaaatggtcttgtcagggacgatcaataaatttttcgtaaccgaactcgcgaaaaacgggctgaaagccgcgggaatatcaggaaaggacggcggtctccttcaagcatcctatcttaatcaagacaaatacggagaagtcggcgaaatacaaaaaaccgatccgtcaatcattcacgcattaatgaaagaaggcatcattcccgttatcgctccgctttccatgacaagtgatttcgaaacgctgaacgtcaacgcagacgccgcggcatcggccgtcgcttcagccttacacgccgacaaacttttatttgtcacggatgtcgaaggaattatggacggagagagcaggctggatactttgacgccgcaagagattcaggccctcatagatgacggcgtgatttcaggagggatgattccgaaggtaaactcggcattatcggcactgagtgaagatgtcgaggaagtgatgatcgtaaacggaaaaggagcgtttttcaccgatcaagccttccaaggaacaaaaattgtcaaagaaaaggagagcgtgtcatgagcagtctatttcaaacctacagtcgctggcccatcgatatcaaaaaagcgaaagggacaattgcagaggatgaaaacggaaaaacgtatctcgattttattcagggcatcgccgtttccaatctcggccattgtcatgatgaggtcacagaagcggtgaaagaacagcttgacagcgtatggcacgtttccaatctgtttgaaaatgatcttcaggaaaaagccgcggcaaagcttgccgaacatagcgcgggggatctcgttttcttctgcaacagcggggccgaagcgaatgaaggcgccattaagcttgcccgtaaagcaacgggaaagacaaaaattgtaacatttcatcaatcctttcacgggcggacctatgcggggatggccgccaccggacaagacaaaatcaagaccggtttcggaccgatgcttcaaggctttcactatcttccgttcaatgatccgtcggcattcagcacgctttcaaaagaggatgatatcgccgccgtcatgcttgagacggtgcagggagaagggggagtcaatcccgccgatccggaattcatcgaagccttacagacattttgcaaagacaaacaggcgctgcttatcgcagacgagattcaaaccggaatcggccggacgggcaaggcattcggctatgagcatttcggcatctcgccggacatcatcactgctgcgaaagggcttggaaacggttttcccgtcggagccgtgatcggcaaaaagaagcttggcgacgcctttacgccgggtacgcatggtacgactttcggcggcaataagcttgccatggcagctgtgaaagcaaccttggacattgtgtttcagccggactttctccaggcggcggcagacaaaggatcatttttaaaagcgcagctgaaccgtgaactgacagggccttttgtaaaagaaatccgcggaaaagggttattaatcggcattgaatgcgcaggtcccgtgtccggcatcatcggagatctgcaggaacgcgggcttctcgtgcttccggccggaccgaatgtcatcaggctgctcccgccgcttacggtttctgaagaagaaatgctgtcggccgtcagtatgctgaaagcagcgatcgaagcgcattcggcagtgaaacggtaattttttttcgatataaaagtataaaaattcatatttttaattaattattcatcaagaggtgggctttagatgaaaggctatttagtattggaagacggaacatcattcggcggtgaacttgaaaaagaagcccgctgtgttggcgaagcggtttttttcaccggaatgacgggttatcaggaagtgcttacagacccgtcatataagggtcagatcgtcgtctttacgtatccgctgatcggaaactacggaattaatgaaaaagaccttgaaagtaagattcctcaagtcaaggctgttgccgtctatgaagcgtgtgaacatttttctcaccatgaagcagtctcaagcttgagagagtatttaaataaatggaacatcccgctcttaaccgaagtggacacacgggccgtcgtcaaaaccatccgctccggcggcacgatgaacgctgccgtgtcaacaacaggagaaattccggcagcatccggaacagaaaacccggcggagctggcgcagtctgaagacatcacgtcaatggggaatggagaccggcatattgcgctgattgatttcggttataaaaaatcaatcgcctcgtcacttgtaaagcgcggctgtaaagtaacggtcattccgtatcagcagatgaacgctgtttacgacattcagcctgacggaatcgtgctctcaaacggcccgggcgacccgaaagcgattgcgccgtacatgaaccggattacatcattactcagtgatttccccgcactcggtatttgcctcgggcatcagctgattgccctggctttcggaggaaatacgtataagctgccgttcggccacaggggtgccaaccatcccgtcattgaccggaaaacgaaacgggtgtttatgacaagccagaaccacagctatgtcgttgatgaagcatcaattgacgaaaacgagctgtccatcagatttcatcatgtcaatgacacatcagtggaagggctcattcataagcgccttcccgtattaagcgtccagttccaccctgaagctcatcccggaccggctgagagcgagtggatatttgatgaatttctagagaaagtgataccagcaaggagagaaatcgctcatgcctaaagatacaaccatttccagcatattagtcatcggctccggcccgatcatcatcggccaggcggcagaatttgattattcaggaacgcagggctgcatggctctgaaagaagaaggataccgcgttattctagtcaacaacaacccggcaacgattatgacggatgaggcgtttgccgatgaaatatattttgaaccgctcacaaccgacagcatcgaggccattattgaaaaagaaaaaccagacggtctgcttgccaatttgggcggccagacggcattgaatttagccgttaagcttgaagaagcaggcgtgctgaagaagcatcacgtcaagcttttgggaacatcggtggaaaccattcaaaaaggcgaagaccgggagcagttccgcgccctgatgaaagagctcgatcagcccgttcctgaaagcgaaattgtcgacaacgaagaagatgccctccgtttcgccgagtctatcggatttccggttattctgagaccggcgtatacgttaggcggaaagggaggcggaatcgcgaaaacgaaagaagcgtttcagacgcttattaaacaggcgctgttagcaagcccgatcagccaatgcctcgtcgaaaaaagcatcgccggatttaaagaaatcgaatatgaggtcatgcgtgacagcaatcatacatgcatcaccgtctgcaacatggaaaacatcgatcccgtcggcgtgcatacaggagactccatcgtcgtcgcaccgtcccagacgttaacggatgaagaatatcagatgctgcgttcagcaagcctggcgattatttcggcgctggatgtggtcggcggctgcaacattcaatttgcgctggatccgttcagcaaacagtactatgtcattgaagtgaacccgcgtgtcagccgctcttcagctctcgcgtcaaaagcgaccggctatccgattgccaaaatggcggcgaaacttgccgtcggctatacgcttgacgaactgaaaaatccgctgacgggctctacttatgcaagctttgaaccggcgcttgattatgtcatcgtcaaattcccgcgctggccgtttgataaatttaaacatgccgaccgcacgctcggaacgaagatgaaagcgacgggagaggtcatggcgattgaaagaaatatggaagcggccattcaaaaagcggcagcctcccttgagctgaaaacgatcggcacccgcctgcctgaactcggcggctgtacgatcaatcagctgtgggaattagcggtaacgccggatgaccggagatttttcgtcgtcatggaactgttaagccgcggtgaaacgatagaagacatccatgccaaaacgaaaattgacccgttttttctccatgtattccgaaatatcatcacattggaaaacaagctgatggaagaaggggatcatctgtcaatgccgcttttaaagcaggcgaaggtaaaaggcttcacggatgtcatgatcgcatctctcacgggaaaaacggaagaagacatccgtgctctcagaaagaaatcaggcatcgtcccgtcgtttaaaatcgtagatacatgcgccgctgaatttgatgccaagacgaattatttctactccacctacctcggggaaagcgacggagatatcagccgaaaagagaaaaaacgcgccctcatcatcggctccggcccgatccgcatcggtcagggagtggaatttgattacagtgccgtccacggcgttctgaccctgcaaaagctggggtatgaaacgattatgatcaataacaatccggaaacagtaagcacggattatgaaatcgctgaccggctttattttgaaccgctgacgacagaacatattttgaacgtggcggaacatgaaaacattgattttgccatcgtccagtttggggggcagaccgcgatcaatgccgctgaaccgctggaaaaagcgggcattccgctgctcggaacatcctttgaaacccttgatgcgctggaggatcgggatctgttttatcagctgcttgatgaccttgacctgaaacatgccaaaggcgaaaccgcttattcaaaagaagaagcaacggaaaaagcaagccgaatcggctaccccgtgctgatccgtccgtcttatgtcatcggtgggatgggcatgatcatcgttgattcagaagcgcaaatgtcagaactgctggaaaatgaagcgggcatgccgtatccgattttgatcgatcagtacattacaggaaaagaattggagatcgatctgatttccgacggacatgaagtattcgtgccgacttacacagagcacattgaacgcgccggcgtccattcgggcgacagttttgcgattcttccgggtccgtctgtcacacctgatatgcagcggaatataagagaggccgccgaaaaaatcgcggtaaaactggcttttaaaggcatcatgaacattcagtttgtcattgatgacaaaggggatattctcgttcttgaagtgaatccgcgggcaagccgcacggttcctgtcgtgtctaaggtgatgggggtgccgatgatcccgcttgccgccagattgctggccggcgcttcccttaaagacatcaagcccgaggttcaaaatcagcacggaacggcagtgaaattcccggttttttcttcgcacgccattcaggatgtggacgtaaagcccgggccggaaatgaagtcgaccggagaaggcatgtgtgtcgcgtttgacgcagaaagcgccctgaaaaaaatctacgcgcacgtctgggagaaaaaaggcagcatctatctggaaggctgtgatgcggaattggaacgtcaggctcaagaggcgggatttaccgtatgcaaagatgcgttcccggcatgggcagagcgaaaggataaagcggtccatatcaatttcaatcactctgaagaagcgcgtaaacaacggattgaagccatgacgcacggtgtgacggtctttactgaaccggaaaccgtaaaggcatttttagcaagcggctccggcaaacctaagcctgtatcgctcaaagatctttatcaaaaggaagtggcatcatgcacacaataaaagcggaacacacattaacccatttgtacggcaaagattttctttccttaaaagatgtcagcccgtcagacatcaaagcgcttctgacagaagcttcattattaaaacaacatccgatacagccgattttccaagggaaaacattggcgatgatttttgaaaaatcttcaacccgcacacgtgtgtcttttgaagcgggaatggcccagctcgggggaacgggactatttctttcaagcagcgacctgcagcttgggcggggggagacggtcgcggatacggcgaaggtgctgtccggcttcgttgatgccattatgatccgcacctttgagcatgaaacagtcgaagagcttgccgagcatgcagacattcccgtcataaacgggctgaccgaccggtatcacccgtgtcaggcactcgcggatctgttaacgatacaagaaataaaaggaaaactgaaaggagtaaaagccgcctatatcggtgacggaaataatgtggcgcattcacttatgatcggctgcgcaaaaatgggctgtgacattgcgattgcttcgccgaaaggctatgaagtagaggaagaggcggtgaatgccgcgaaagaagcggcggctgtttccggagcgaaaatcacccttaccgaaaatccgcaggaagcggtgcgggatgcagatgtgatttactccgacgtcttcacgagcatggggcaggaggaagagacgcagcagcggctgaatgtgtttgccccgtatcaagtcaacgcctcactcgtcagtctcgcaaaacccgactatacatttttgcattgcctgcccgcgcatcgggaagaagaggtcacgtccgagattatcgacggtccgaactctgcggtatttcagcaggcggaaaaccggcttcacgcgcaaaaagcgctcctgaaagctcttctttacaaacaggatgaacaaaaaaaccgctgaatctcattcagcggtttttgatatttctccgcatacaagcgcatactacataaaaaagaaaaaggaggaaatgacgtgggacagcagcatcaattccgcccgggacaaaaagcgccgaataacggtgtgtacgttgaaatcggcgaaacgggaagcatggtcaaaaacccgcaaaaaatcaagcttacggtgggggaaatgttccctgaaacttcaaaccacaacagattgtggacgtatcaacgaaaaccgtgaacacaaaaaaacctgctgaatagcaggtttttttatttaatgctggcttgcatcctgtttgacaggcatgatctccgcaagaacaaagactagcaccgcaataaccacggcaataacggatgattgcttgaaattgtacgccgcgctgttcatggaggcgaccaaataacaggccatatgtgttaaaaggaacgtccaaataaaaccgataataaaccgcacgtttccacctcgtccttcattttattctacgttgtatcataccatacataaagcgcgggcggaaggtcattttctcatcaaaaagcgcgcctgaaactgacatttgcccgcctgtccggccgtctgatggaaaattcggttcctgtgctcgggataatagccaaaacatagcagcaaataggagtttatccgatccgttttcattcttcttacatatgatagccaatagagagattaggagtaaaaggaggcgggcaggcatggggattacggaaagatttttccaattcggatctgagctgaacgtcatccatctgccgtatcggccgaatggcttctgtatctttattctgggggacagaacccactttgtcagccgggactcaagcttttggctcgaacatgaagggagaaaccagctgttaaatacgatgcttgacagaggatacaccatttttaacagcaatttatacggacggcattggggttcggaaaaagccgtcctttacgccagacagctgattcattatgtgctgaaacaagaaatcctcaatccgaaaatacacttgctcgcagaaggcatgggcgcccttatcgccgatcaattgctgcagtcttcagcggagcatatccgttcagccgcaatgttagatccttgtcttgaccttcaagcccattttgaatcagagaaagaaaataagtttttttataagcagtttctgagggaaacggcacagagcttcggtgtttctgaaaaagaggcaagctcactgagctatcagaccattaccggctgccgcacccgcgtgccggtacatatatggcaaagaacgaccggagcgccgtacccgtacaccctgcatgcgaatgcgtataaagaagcccgggaaaagaccggaagcaagactgatatcacgtatcacctgcttgagaaccctgcgcgtatgtacagagccatctgccggtttttccgcagtcatgaaaaagacctgtaatgaatagaatacaacagccatctcttttcagagggctgtttggcttgtgtgcgaatgaaaaaccggaaaggcggcagatgtgatgaagacagcgctgatcattggagcagatgaatttctcggcctttcattgtgcgaacggttgatggatgagggtgtgcatgttgatgtcattttggcagaaccggaggacaaaacgaggcagctgtatttagaagaacgtttaatgtggctcgcgagaaacgggctttttcaaataatagatgaaatcggtgaaaaggaatacgatcgtatctgcgttcaatacgggagcgggtgtctgcctgaagaaagggctgagcctttatattggattgtttacagtgaggatcacggagactgggaaaaaaacggtcagcgggatacggcaaaagcgattatccttcctcccctttacggtccgtggacagaagcaaaagaagatggcgaaagcaggatctttttagaagacgcagtctgcgggctgatgaatcagcttgaggcatacggcacagaagacgaaaatcagattattaccctggaaataaaagaaaaaacgcaaaaaacggaagcggaagaaaaaattaaagaatggaaaagacaattttcatcaatattcgacattttttaagaaataccttccatgttatgtgcattaccgctacaataaacgtatatcaattatacatgttatgagtttgaaaaggggttgaacatggcttgatcaccaggcttgtcatgatcttttctgtcctccttttattgagcggatgcgcacaaactccgtttaaaggaaaaattgagaaggtcggaatgctttttcccgatactatcagtgacttggtatggggcacaaaaggttacaaaggtttattagcgatacaatctgaatttaacgttgacgtttattataaagaaaatatcagatccgatgaagatattttaaaagcgatagatgattttcataaaaaaggagtcaatcttttatacgggcacggaaatgaatacgaggaaatcttcaatatgatcagcaaggattatcccgacatggaattcgtcgtcgcaaacggaacggcgaaaagcgataatgtcacaagcgttcatcttatgggagaagcaatgggttttttcgggggaatgacagccgcccatatgtcaaaaaccaatgaggtcggcgtcatcgcctcctttttgtggcagcctgaagtagacggctttatcaaaggggcgaaatatgaaaagcctgatatcaccgtcaatactgaatttacggaccactgggataacggcaatgaagcgctgcatctttacgagaagttaaaagcggaaggcacggatgttgtatatccggccggagacgggtataatgttcctgtcattcagcaaatcaaaaaagacgggctttacgccatcggctatgtcgccgagcaatcgaatctcggcaaaaacacggtgctgacaagcacggtgcaaaacgtagataaagcctatacattaattgccgagcaatataataaaggtacgctcaagagcggagatcacaactttgatttcagggaaggagtcgttgaaatggggacgttcagccctctggtggacaaagcatttcaagacaaaatctcagaccttgtaaaaacgtataaccgaacaaatgaactgccgtcaaatgaatagaggtggatacacatgcagcatgaaaagtctcttgaatttatgcagatcgcgatgaaatacctgccggaagcaaaggcggagcttgagaaatccggcatagatctgtctttggaaatgattcagccgtttatggacctgtttacatcggtcatggcggaagcgtatgagcttggcagatctgatgccggggagctgaataaataaagagagccacttttcatgaagtggcttttcacatgatttttttctttatagcggacaccatcggcgcgaagtctttaaatacaggctttaattgatccagagagttcatgatggaccccagctgattcatcacgtggttgtaatcgatctcttcttcgttttcagcctgaggctgctccgggttttcttccggttctttatcccggtctctggaatcgccgaacatcattttggagaaaatatccatagtgaagcctcctttcgtcttccttttattctatgaggagcagcgtccgatagtttagacgaatatattgccaacagaaaaaaaatagggtagaattagtacctgatactaataattgatcataactaattagttttaaattcattataaaaaaggagtctttccaatgaaagctggaattcttggcgtcggccgttacatcccggaaaaagtgctgacaaatcatgatcttgaacaaatggtagatacatcggacgagtggattcgtacgagaacaggtatagaagaaagaagaatcgccgcggaagatatgtattcatccggcatggccgctgaggctgcgcaaaaagcgcttgatcaggccggcatttccgctgaggagcttgatatgatcctcgtggcgacggttactcctgaccagtctttccccaccgtttcctgtatgatacaagagaagctcggggccaaaaaagcgtgcgcgatggatatcagcgccgcatgtgcgggttttatgtacggtatcgtaaccgccaaacaattcattgaatcgcaaacatacaaacatgtcctcgtggtcggcgtggaaaagctctcaagcattaccgactgggacgaccgcaatacggctgtgctgttcggagacggagccggagcggcggtcatcggaccggtcagcgacgacagaggcatactgtcatttgagctcggagcagacggtacaggcggtcagcacttgtacttagatgaaaaagggcatacaatcatgcatggaagagaagtattcaaattcgccgtccggcaaatgggtgaatcgagtgtaaatgtcattgaaaaagccggcctctccaaagaggacgtagactttttgattccgcatcaggcaaacatccgcatcatggaagcggcacgggaacgtttggagcttccggttgaaaagatgtctaaaacagtccataaatatggaaacacatccgcagcatccattccgatttcattagtagaggaactggaagcaggcaaaattaaagacggcgacgtcatcgtcatggtcggtttcggcggaggattgacatggggcgccatagcaatacgctggggacgataaaaaaaggtgaggtgcacacaagatgagtaaaaaaagagtagtcgttacagggcttggagccctgtctccgcttggaaacgacgccgaaacaagctggaaaaatgcaatcggcggcgtatccggaatcggaccgatcacacgtgtggaatcggacgagtatccggcgaaagtagctgctgaactgaaagatttcaatattgaaaattacatggataaaaaagaagcgcgaaaaatggaccgcttcacgcaatacgctgtcgtagccgcgaaaatggcagttcaagatgccggtctgaacatcacagacgagatcgcgccgagagtcggcgtttgggtcgggtccggaatcggcggtcttgaaacgcttgaatcccaattcgaaatcttcctgacaaaagggccgagaagagtcagcccgttctttgttccgatgatgattccggatatggcgacaggccaaatctcaatcgctctcggagcaaaaggagtcaactcctgtacggtgacggcatgtgcgacgggaacgaactctatcggtgacgcgtttaaagtcattcagcgcggcgatgccgatgcgatgattacgggcggaacggaagcgccgctgacaagaatgtcatttgcgggcttcagcgcaaacaaagccctttctacaaatcctgatccgaaaacggcaagccgcccgtttgataaaaaccgtgacggctttgtcatgggagaaggcgcggggatcgtcgtgcttgaagagcttgagcatgcccttgcccgcggtgcgaaaatctacggggaaattgtcggctacggctcaacgggtgatgcctatcacattaccgcgcctgcccaagacggggaaggcggtgcgagagcgatgcaggaagcaatcaaagatgcgggcatcaagcctgaagaaattgattacatcaacgctcacggcacaagcacgtactacaatgataaatacgagacaaaagccattaagaccgttttcggtgatcatgcgtacaagctcgccgtcagttcgacaaaatcaatgacgggtcatttgttaggcgctgccggaggaattgaagcaatcttctccgtcatggccattaaagacagcattatcccgccgacgattaacatcgaaacacctgatgaagagtgtgatttagattatgtaccggacaaagcgcgcgagcaggatgtcaacatcgttctcagcaactcgctcggcttcggcggacataatgccactttgatctttaaaaaatatcaataatacagttttgaccggctgcctgaaaaaggtggccggtttttttgtgtgtgcatatgataacaacaagaggaggcgaaccggtatgagcgtcaagcagacatatcaatggatggaaaaggcggcatccgtaaatgatctggccccgcatcttttgccgctttttgcaggggccgataagaaagagtggaagccgatactcgggatgctgcaaaaccacggcatgttccgccatttgaaggacggcgttaggaccagtaaacggctgaaagaaaaaggatgctacagccatattcaaaaggaggaagcttatttaaaggagaagtggaacgggccggacgtgccgatcgtagttttgcccgtcgacgaacgaaaccggaaaatccgtcaggaattcggatcaaaatccggtctggcctttcgggacaaaatgttcctctttctatcgtcggatagttccaattcagctgtatccgcccttttgacacatgaatataatcacgtctgccggttagaacatgtgacaaaggacgaaaaagatgagacatttcttgatacaatcatgatggaggggctggcagaatatgctgtatatgagcggttcggctcaagtcttacggcggaatggacgtcctactatacgcctgagcagcttgattttctgtttgaaaaaagagtcaagccgaacctccgcttaacgagagacagcagaatgttttcccagctgttatacggaaaaggatacttcccctcaatgctcggctatgccgtcggattcaatatagtaaaaaaatatttaaccggccatcaaaaaacagtaaaagaagcattggccatcccttcaaaaacctttctggaggcaacgctttaatagattaaaagaatggaaattatttaaggatattacatttatcctaaaaaattcttgcttttgtaataatgatgtaataatatacaactataaaatttttcgactattctatattttgtgatagcgaaacgtatgtttccctctgcttcagcggaatgagaaaggggcgtatcatgagcacactattagaagtgaataatttaaagacctattttttcagaaagaaacagccgatccccgcagtcgacggggttgattttcacattaacaaaggcgaaaccgtcgctcttgtaggagaatccggctcgggcaaaagcatcacctcgctttctattatgggacttgtccaaggctcgggcggaaaaattatggacggctcgattaagcttgaaggcagggacctggcctccttcaccgaaaacgaatattgcaaaatccgcggaaatgacgtctctatgatctttcaggagcccatgacttccctgaatccggtgctgaccatcggcgaacaaattaccgaagtgcttgaataccataaaaaaatgaataaaaaagaagcggctaaaaaagccgttgagcttctggaactcgtcggattctccagagcggaacaagtaatgaaagaatatccgcaccgtctttccggagggatgagacagagggtgatgatcgccattgcgctcagctgcaatccgaagcttctgatcgctgatgagccgacgacggcgcttgatgtgacgatacaagcccaagtattggagctgatgaaagacctctgcaaaaaattcgatacttccattctgctgatcactcacgatttaggtgtggtttccgaagccgccgacagggtgatcgtgatgtactgcggacaagtcgtagagagcgcgagtgtggaggacttatttttaaaccctcttcatccgtataccgaagggctgttaaactccataccggtgatagatggagagattgatacattaaaagcgatcaaaggcagtgtcccgacaccggataatcttccggaaggctgccgatttgccccgaggtgttcaaaagcgatggacaaatgcaaaacagggcagccggagctgataacgcatgaaagcggccgttctgtaagatgttttttatatgaggaagagggtgcccaatcaaaatgacagctgcaggccaagaaacgattttagagctgaaagacgtaaaaaaatatttcccgatccgctccggtttttttcaaaggaaagtcggtgatataaaggctgttgacggtgtttctttttcactgaagcgcggggagacgctcggcatcgtcggtgaatcaggatgcggcaaatcaacggcgggaaggacgatgatccgtttatacaagccgacagacggccggattctttttaaggggcaggatatctccggcttatctgaagaaaagctgagaaaaagcgtccgcaaaaacatccagatggtcttccaagatcccttcgcatcccttaacccgaggaaaacgctgcgttccattattaaagagccgttccagactcaccatatgtacagcatgagcgagcggaacgagcgagtggaggagctgctggcgaaagtcggccttcatccgagctttgcaaaccgctatccgcacgaattttccggggggcagcgccagcggatcgggattgcgcgggctctgacgttgaatcccgagctgattattgcggatgaacccgtttccgcactcgatgtctccattcaggcccaggtcatcaatctgatggaagaactgcaggatgaattcaacctgacctatttgtttatttctcatgatttgagtgttgtccgccatatcagcgacagagtcggcgtcatgtatctgggaaaaatgatggagctgaccgataaacacgagctgtacggcaatccgcttcacccttatacgcaagcgcttttgtcttcagtgcccgtcacgagaaaaaaagacgccgtcaagcgggaacgaatcatcctgaaaggagaactgccaagcccggcaaacccgccgaaaggctgcgtgttccacacgcggtgcccgatggccaaaccgatctgcaaggaacaaatcccggcatttgaagaagccgctcccggccattacgttgcctgccatttatatgcctgaaatgacaagcatcgagagggggtatgccggattacataaccagtttgctgcatatatatcacaaagggggaattgatatgaaattacgtaaaagcgcactgatgatgctaagtgtttttatggcgtttgccatcttcctgtcagcctgctccggctcaaaatccacaagcaccgaatccaaaccggcaggaaaaccgcaaaaaggcggagatttggttgtcgggtcaaccggggaacccacactttttaatccactttattctactgatgttgcaagttctgatattgaaggaatgctttacagcacattattggaaactgatgagaaattaaacgtcaagccgtcgctggctgaaaaagtaacagaagctgacgggggattaacgtatgatgtaaaactgaaaaaaggcgtaaaattccatgatggaaaagagctgacggccgatgatgttgttttcacctacagcatccctcttaacaaagattacaacggtgagcgtggctcgggttttgagtcccttaaatccgtaacgaaaaaaggaaaatatgaaattcagtttaaaatgaagaaaaaagatgcctatttctataatgtcgttctcgacagttacggcattttgcctaaacatatattgggtaaggtcccggttgctgatctgggagagaatgaatttaaccgtaaaaatccaatcggttccggtccgtttaagtttgttgagtggaaaaaaggtgagtatgtcaaactggaagcaaatgatgattactttggcggcagaccttaccttgatacagtgacagtaaaaacaatacctgattctaacgcggccgtggctcagttaaaagcgggggatattgatttcttcgttgtgccgggcacagattttgatacggttaaaacgtttggaaatgtgaaggtcaaatctgaccttggtttaaactacagctatatcggctggaatgagaaaaaagagatctttaaagacaaaaaagtgcgtcaggcattgacttacgctcttgacaggcaggcaatggtggatcaagtgctgaacggagacggtaaggtagcggatgttcctgagagtccgctgtcatggaattatccgaagtctaaagtgccgacatttgattataatccgaaaaaagcaaagcagctgctaaaagaagccggatgggaagaccatgacggtgacggctaccttgataaagacggaaaaaaattctcatttgaaattaaaacgaatcaaggcaataaaattcgtgaagatttagctgttgtcgttcagcagcaattaaaagaagtgggaatcgaggctaaaccgcgaattgttgaattcagtgcgttaatcgaacagacaagtgcccctaattgggattatgacgctcttcttctcggatggagtcttgcaacgttcccggatcaattctctatcttccattcaagccaatcgaaaaacgggctgaataatatctggtataaaaacccgaaagtcgataagctgcttgaagaagcgaagacaattacagacagaaaagaataccaaaagaagtatgaagagatatacaaattgattgctgaagatcagccgtacagcttcttattctattacaattaccacagagcgatgccgaataatttacaaggttatgtattccaccctaaaaatgacttgtacaatattgaaaaatggtggctggatcaaaaatagcaaaagccctggagagggaaggaggttcctttcctctcttatcctatttaaaaaggggacaagaacatggttacatatattttacggcgaacattaatgtccttgccgattctcttaggcattacaattttgtcgtttgccatcatgaaagcagcgccgggagacccgatgtcacttatgatggaccctacaatcagtcaagcggacagggcaaaattcattgaaaaatacgggttgaatgatccggaacctgttcaatatgtgaaatggctggggaatatgctgcaaggggatttcgggacttctatcgtcaagaaaggcactccagtttctgaacttatcttatcccgcttaccgaatacgattgtgcttatgcttttctcaacccttgtcgctcttcttatttctattccatttggtgttctgtcagcgaaacgtccttattcaaaattggattacgggataactgttacttcatttttagggcttgccattccgaatttttggttcggtttgattttaatcatggttttatctgtaaatctggggtggtttcccactggcggagtaagcactttgaatgctgactttaacatatttgaccgattgcatcacttgattctgcctgcttttgtgctcgctacggcagacatggcagggataacgagatacacaagatccagtatgcttgatgtgttaaaacaggattatatacgaacggcgcgtgcgaaaggattccgagataataaagtaatttttaaacacggtttgagaaacggacttcttcctgtcatcactatttttggtctgatgataccgtcatttatcgggggagcggtagtggtagaacagatttttacttggccgggtctcggtaaattgtttattgattcagccttttcgcgggattatccggttatcatggccatgacggtcatttcagctgttttggttgtggtggggaatttaattgcggacatcttatatgcgctggttgatccccgcattgaatattaacaaagagaggtgagaggtcaaatgttacagccaaataccggcacaccccccagcgaagtaaaattaaaggaaaatattcaatccaaaccggaaacaatgacgaagatttttttcgaaaagttctttcaaaataaactagctgtaatcggagccgttatattaaccatcatcatcttgtcagccttattcgcttcggtaatcgctccttactctccggagagtcaatctcttatcaatcgtttgaagccgccgagcttaaaacatctaatgggaactgataaattcggaagagacatctttacgagggttctgtacggggcgcgcgtctccttgcttgtcggattcgcttctgtgatcggcgcgattacaatcgggacagttgtcggagccgttgccggatattttaaagggattgtcgatgccgttctcatgagaaccgttgatatcgtattatccatacctgatatatttttgcttattacacttgttacgattttccagcccggaatggataaattaattttaattttctcccttacaggctggacaacaacggcacgtcttgtccgaggggagtttttatcgcttcgttccagagagtttgtattagctgcaaagacgatcggtacaaaaaatcatcacatcatcttttctcatatattgccgaatgcgctcggaccgattattgtctcagccacattaaaggtgggaacggttattttggcggaatctacattaagttatctcggtttcgggattcagccgccgatcgcaagctggggcaatatgcttcaggatgcacagaactttacgcttatgattcaggcttggtggtacccgttattcccagggttgttgattcttcttaccgtattgtgctttaactttgtcggagacgggctgcgtgatgcgcttgatccgaaaaatgtgaaatgatctcccggacggaacgggagatttttttgttgcgatgcagtcggaaatccagctccgtaatgcggaaatctcacattgaaatggaataatttatctatcccttgcctatactgtggacaacagtttttataaagtgaggggtcgaatatgttatttcttcatgatgtatgggtcaattggtttgaaggggaagaaaacggctacaatgtatgccattttcacgaatggcggaaggaagacacggttgagcttttggatcagacgccgctgctcagagtgccgtcggtattatttcattacatagaaaacgacttatcagagcttccgaaagagctgcttgaccaagtccaccaaaagtcatacgttcgaaaaaatcatgagcggacaaagctggagtattgttttgtcgtgacagacgggatcggcatcattgccgtggatacgatcgggtatacgattccggtcagaaagagccgcctgattccgagacaggagcagcttgtttatgaaatggtaaaggatgtagaaccggaatcgtttcaatttgagccgtcgcaattggagtcttcaaaggaatatcacattttgtcattggcgccggagcacgtcagagggctgacgagaaaagagcggcagatcaagcagctgatgtttatggcgctcgaccagctgaaagggctgaaaaaccgtgcggaaattgtgtattggtacacggaatggaatccgcatatgtatgagcagatcaaacggatgagctttgaagagatttgggacatgctttacaatgaaacaattgaaggctggtcagataaacatcttgcgttctgtgaaaatttgattaaagggcagccgtttttcgaaaagctttgggaaatggagcaggaatcaaaagtgaactaaaaaagaggcggagattctcccgcctcttttctttatcttcttttccgtccgagacccatggcgttttccattttcttcaccattttgccggccgttttgtttgcgcgcgccgctccttcgtcgagaatgcggtcaagttcgtcgctctcaattaattcacggtagcgctcttggatcggtgtcaatgcgccgataacgacttcggctaaatcgcttttgaattcaccgtaccctttgccttcatatttagcttctaattcttcaattgatgtgtttcctaaaatagaatagatcgtcaaaagattagaaacgcccggtttgttttctttatcatactttacaatgccttcagaatcagtcacggcgctcttgattttcttctcgagctgcttcggttcatcaagcagcgtgatgaatgccttttggttcggatctgatttgctcatttttttgagcggatcagccagtgacatgatgcgcgcgcctgattcaggaattttcacctcaggaatcgtgaagatgtcattgtattttttattaaagcgttccgccaggttgcgggtcagttcaagatgctgtttttggtcttccccgaccggaacaaggtccgttccgtacagtaaaatatcgccggccatcagcggcggataggttaacagtccggacacgacggcttctttgccctttgacttatccttaaattgcgtcatccgctcaagctcgccgatatatgcgacgcattggagcatccaccccgcctgggcatgagcgggaacctccgactggataaagagggtcgctttctcgggatcaagtccgacggccaggtaaagagccgcgagattgcggatgttcttccgcagctcaagccgatcctgcggaaccgtaatcgcatgctgatcgacaatacagaagtagccgttgtagtcatgctgcaaatcaacaaattgcttcattgcgccgatgtagttgccgagggtaacggaaccgctcggctgaatgccagaaaaaatcgttttcttcatagttcttacctcatttcttaaaacataataaaaaaagcccattcttcccgtagaaaaaagggacgaatgaaccgtggtgccaccctgattattccattacaatggaatcgctcgagacgttggtaacggaggctgctccggctgggcctactaacgttcggtcagctgctcagaagtccattccacatcgcccgttacctgctcccagcaccgcagactctcttcaaacggatgaaaatgtgtactactcttcatcatcgcaatcacaacaaatgtatttgattgatctattataaatcaattatagccaaatgtcatcagaggaatacaagcttatttccagtttgcttaagggctggaaatcctcaaaaagaactgaaaatgcttaaatgataacgcatatcaacatttcgtataacgaatattatatgtaaaaagcaatatgaactggaaattacaataaaaaaatttagttaggtcatgctttaaactatagaagtgtatcacctttttgacagaaaaactgaccaaatttaaatattttaaattgagaaaatagtattgcaataaattattcatttcattataatgaacttgttcactctattgttacagcttctttacataaaataatcagaaaagacggaacacaattaaagtttagaaaaatattaagttattttgtctgatatttctgagtatttagtagtaaaggctgaaaaatttgattagggggttagtgcatgaaaaagcgttggtctattgtaggtttgatgcttatcttctcgcttgtattaagtgcgtgcggcggattcagcggcggatcaggcggcggtaaaaaagacaccaaaggacagacttcacttaatatcaatattaaaaccgagccgttctcactgcatccgggtttagcgaatgattccgtttcaggaggcgtaatccgccagacttttgaaggattgacacgcgtaaactccaaaggtgagcctgaagaaggaatggcatctaaaattgaaacaagcaaagacggaaagacctatacatttacgattcgtgacggtgcgaaatggtctaacggggaccctgtgacggcgcaggattttgaatatgcgtggaaatgggcgcttgacccgaacaacgaatcacaatatgcttatcagctctactacattaaaggcgctgaagctgccaatacaggaaaaggcaagattgatgatgtaggcgtaaaagccgtaaatgacaaaacattaaaggttgaactgaataacccgacaccttatttcacgcaattaacttcattctatacgtatatgccgatcaacaagaaaatcgcggaaaaacataaaaactggaacacaaacgcgggcgaaaattatgtgtcaaacggcccgttcaaaatgacggcctggaaacacagcggttccatcacgctcgaaaagaacgatcaatattgggataaagacgctgtgaaattgaagaaaatcaacatggtgatgattaacaataacaacaccgaactgaaaaaattccaggccggtgagcttgactgggcaggaatgccgctcggacagcttccgactgaatctctgccgacattgaaaaaagacggatctcttcacgttgaaccgatcgcaggcgtgtattggtacaaattcaacacagaagcgaaaccgctgaacaatgttaacatccgtaaagcccttgcttatgcgatcgaccgctcgtccatcgtaaaaaatgtaacgcagggcgaacagatcccggccatggctgcggtgccgccgtcaatgaagggattcaaggataacacaaaaggttatttcaaagacaatgacgtcaaatcagctaaagaattcttaaataaaggactgaaggaattaggcgtcaagaatgcctctgaccttccggcgatcaaactgtcctacaatacggatgacgcgcatgcaaaaattgcgcaggccgtacaggaaatgtggaaaaagaacttgggcgtcaaagttgagcttgataactccgaatggaatgtttacatcgacaagctgcacagccagaactaccaaatcgggcgtatgggctggctcggcgatttcaacgatccgatcaacttcctagaattgttccgtgataaagaaggcggaaacaatgataccggatgggaagatcctgagtttaaaaagctgctgaaccaatctcagcttgaaacggatccggataaacgtatcgaagagctgaaaaaagcagaaaagatctttattgacgcaatgccggtcgcgccagtttatttctatacggatccttgggtgcaggataaaaacctcaaaaatgtgatcttgacaggaacaggcgaagtttacttcagaaatgcttcttttgaataaaagacggttctgaaaacaaaagacccaaggtatatggggaggatgtccccatatacctttcttactgattaagtataaaattgtaaaaaacatggaggtgttcaccttgctgaaatatatcggtaaacgattcatttacatgatcatcacgctgtttgtgattgtgaccgccacattcttcttaatgcaggcagcgccgggcggaccattttccggcgaaagaaagctgccgcctgaaattgaggcaaacttaaacgaacactatggcctggacaagcctcttttcgttcaatatgtcagctacttaaaatctgtggcgatgtgggacttcggaccttcttttaaatataaaggccaaagtgttaatgatttaatcaattcaggcttccccgtctcattcactctcggtgcagaagctattctcctcgctttagcgttcggtgtgcttttcggggtgcttgctgccctgtaccataataaatggcaggattataccattgcgattttaacgatctttgggatctcagttccgagctttatattggcgacgattttgcaatatattttctcaattaaattagaactgttcccggtcgcagggtgggaatcctgggcatacacctttctgccctctattgcgctcgcttccatgccgatggcgttcattgccagactctcccgttcaagcatgattgaagtgttaaacagcgattacatacggactgcaaaagctaaaggactttcccgtccgtcagtcaccgtgcgccatgcgcttcgaaacgcgcttttgccggtcgtgacatatatggggccgatggcggcatccattttaacgggaagtttcatcattgaatccattttcggaattcccggtttaggcgcgcattttgtaaacagcattacaaaccgtgattatacggtcattatgggagttaccgtgttcttcagcgtgctcctgcttttatgcgtattaattgtagacgtgctgtacggattaatcgatccgagaatcaagctttccaaagcaaagaaaggagcctagaccatgcagaacattcctaaaaatatgtttgaaccagcttcagctaatgccggcgatgccgaaaaaataaataaaaaaagcctttccctctggaaagacgccatgctccgcttccgcagcaataagcttgcgatggtcgggttcgtactgatcgttcttattattctgatggcgatttttgcgcctgtcttttcaaggtatgattatgccactaccaatctattaaatgcggataaagcgccgtcgaaagatcattggttcggcacggacgaccttggaagggatatattcgtccggacatgggtgggcgcgcggatttctatctttatcggtgtcgcagctgccgtgcttgatttattaatcggcgtaatctggggcagcatttccggtttccgcggcggacgcacagatgaagtgatgatgcgcatcgccgacattctgtgggctgttccttcattattaatggttattttgctgatggttgttctgccgaaaggattgctcaccattatcgtcgccatgacaataacgggctggatcaatatggcgagaatcgtccgcggacaggtgctgcaattaaagaatcaggagtatgttcttgcttcacagacactcggcgccaaaaccggccggcttttgtttaagcatatcgtcccgaacgcgatgggctctatcctcgtaacgatgacactgacggttccgacggcgatttttacagaagcgtttttaagttatttgggcctcggcgtacctgcgccgcttgcgagctggggaacgatggcctcagacggattgcctgcattaacctattacccttggcgtctgttcttccctgccggctttatctgcctggcgatgttcggctttaacgttgtcggcgacgggttaagagacgcgctggatcctaagttacgcaaataaggagtgatatgagtgacacgtttgctagaagtaaaagacttagccatttcatttaaaacatacggcggagaggtacaggcaatccgcggcgtgaatttccatttgaataaaggagagacgctggcgatcgtgggggagtcgggttccggaaaaagtgtgacctcccaagcgattatgaagctgatcccgatgccgccgggctactttaaaagaggacagattctttttgacggacgcgatatcgtgccgatgtctgaaaaagaaatgcaggccatcagaggaaaggatatcggaatgattttccaagatccgatgacctctctgaacccgacgatgagagtcggcaaacaaattacggaagtgcttttcaaacatgaaaaaatctcaagtgaagcggcgaaaaagcgcgccatagagctgcttgatctcgtcggaattccgatgcccgaaaaacggatcggccaattcccccatgaattttcaggcgggatgagacagcgtgtcgtcatcgcgatggcgcttgcggcaaatccgaaactgttaattgccgatgaaccgacaacagctcttgatgtgacgattcaggcacagatccttgagctgatgaaagatctgcaaaagaaaattgatacgtctatcatttttatcacgcatgatctcggcgttgtcgccaatgtcgccgaccgggtcgctgtcatgtacgcgggtcaggtcgtcgaatcgggcacggtggatgaaatcttttatgatccgcgccatccatatacgtggggactgcttgcctcaatgcctagcctggacagcaccgatcaggaaaaactgacggccatcccgggcacgccgcctgatctgacgaatcctccgaaaggggatgcatttgcgctccgcagctcatatgcgatgaaaattgactttgaacaggaaccgccgatgtataaagtgtctgatacgcatttcgtgaaatcgtggcttctgcatcctgatgcgcctaaggtcgagccccctgaagcggtgaaggctaaaatccgtcagcttccgaatacgtatcagcatcctgttttaatgaaggaaggtgaaaaaaatgactgagaaacttctcgaaatcaaacacttaaaacagcattttttcacgcagaaaggaacggtaaaagccgtagatgatttgtcatttgatatttataaaggcgaaacgctcggccttgtcggagaatcgggctgcggtaaatcaacgacgggccgcagtattatccggctgtatgaggcaaccggcggggaagttctctttaacggggaaaatgtccacgggaaaaaatcccgcaagaagctgctggagtttaaccggaaaatgcagatgattttccaggatccgtacgcatctttaaatccgagaatgacagtcgccgacattattgccgagggaatagatattcaccgcctggcaaaaacgaaaaaagagcggatgcagcgggttcacgaactgctggaaacggtcggtttaaataaagagcacgccaaccgctacccgcatgaattttcgggcggacagagacagcgtatcggaatcgccagagcgctggcggttgatccggagtttatcatcgcggacgaaccgatttcggcgcttgacgtctccattcaggcgcaagtcgtcaatttaatgaaagaattgcagaaagaaaaagggctcacttacctgtttatcgcccatgatttatcaatggtcaaatacatcagcgaccgcatcggcgtcatgtatttcggaaaattggtggagcttgcgccggcggatgagctttacgaaaacccgcttcacccatacacgaaatcattgctgtccgctatcccgctccctgatccggactatgaaagaaatcgcacgcgaaagaaatacgatccggcagttcatcagctgcaagacggagaaaaaatggaattcagagaagtgaaaccgggacattttgtcatgtgcacagaagctgaatttaaaacctatctataaacgtatcatcctccaagactcagtcttggaggatttttttgcgcacattcaagtttattaagcctgctcccgtttttctataatggaaaaaaagggggagatcagtatgaaaaccattttgtgcgccatttgtgcgggactgtttatcagtgcagccgcttatccggcccacgccgctgcgaaagaggagcagccgcttgtaaaaatagcgctggccgaaaaagaactgccgaaatcaaatgcacggttcgcttatccgtcagggctgcatttttcacatcctgataaggtgcggggcatttacgtcacagggcattcagcgggaggaagcaaattcggggagctgacagactttgtggacaaaacggagctcaatacaatggtgattgatgtcaaggatgacaacggaaacctcacctttaagccggacggccattctgagtatgccaaaatcgccaagccgtacatcaaagacccaaaaaagatgatgaaaaagctggaggaaaaaaagatctatccgatcgcgcgtattgtcgtatttaaagacagcgaactcgcgaacaaaaagccggagtggtcttttaaagaaaaaaacggaagtgtctggaaaaacggccgcggcgaatcgttcgtcaatccgtttatgaaagaagtatgggattacaatgtaaagattgcaaaacaagccgtaaagatgggttttcaagaaattcagtttgattatgtccgttttcctgaaggatttgaaaaacgtgatgacgaactgacatacggacacggcgattacggaaaaacagcagacagcaatgtgcaaaaacgcgttcacgccgtcaccgattttgtcggttatgcgaagaaaaaactcaagccgtacggcgcggatgtgtcggttgatattttcggctattcagccacgctgccggaagcgcctgggatcggccagaatttcagcaaaatttcagaacaggtcgatgtcatttcatccatgatttacccgagccattggacaagctatttcggcattgataaaccggatcttgagccttacaaagtcgtcaaagaatacgcaaaggtggaaaataaaaaactgtctaagctgaaacaccagcctgtatcgcgtccgtggcttcaggacttcacggcatcatatctcggcagcggaaattatcaaaagtacggaaaacgccaggtggaagaccaggttaaagcgctgcatgatgaaggaattgacgaatttttattgtgggacgcggcaaaccgctataccaaaaacgtcgattacacaccattttaaaaaaattgaaaccatgttaaaggatcacacgtcttaatagatgtaagattgtttaaacaatcggaaatggggtatatctaaaagtgtgaagacaacgaacccataaggagcaaatgaatgaactggtacgaaaagctgagtgaatattttccgattgaagaaatgaaatcaaaagcgcatatggaagctctgttaaaggagcaaagcgatgtttatcataaagaagaggggcagtaccacgtgctgatgtatgcggaatttgactctttcatctttattgattacctgtttgtgtcaaagaaatccagaggacaaggcctcggaagcaagctgatcggcaggctgaaaaagaaaaacaagccgattctgcttgaggtggagcctgttgacgaggatgacacggatacacagaaacgcttgcgtttttatcaaagagagcatttcaagcacgcgcagtcaatcgggtatcggcgccggtcattggctacgaatgaagtgaacaaaatggagattctgtactggtcacctaagacggaatcagaagaagaaatgtttgaagcgatgaaacagacatatgaaaacattcacacttataaagatgaaaaatggtacggagaatcatacgaaaaaacggatgaagttctcaaagtcattgatgagaaaaaacgaaaaaacattttcgatcagctgagctaattgagaatggggaaacatccgccagccgtaaatttgccggattgacacatttttttctcaggagactgttcacacttacttttttatagtataatacctataaagattccttttttaaagtcatttcaatttgagaatacaaacatgttcatcctactaattagaggagtgaagattaatggttacattatacacatcacctagctgtacgtcatgcagaaaagcaagagcttggcttgaagagcacgagattccgtttgtagaaagaaacattttctccgagccgttatcaattgatgagatcaagcagattctgcgtatgactgaagacggtacggatgaaattatctctacccgttctaaagtattccagaaactgaacgtaaatgttgaatctatgccgcttcaagacttatatactttgatcaatgagcatccgggactgctccgccgtccgattatcattgatgaaaaacgtctgcaagtcggctataacgaagatgaaatcagacgattcctgccaagaaaagtgcgttctttccaattaagagaagcacagcgtcttgccaactgatataagcttacgataagcatggaaaaagcccaaaaccatcgcggtttgggctttttgttatttttcagtctgttggtaaatcatactggcgaggataacaaatacgacggtcaaaatcggcagcgtcatttgtataatgccgtgttctgccatgaaaaatgacagcttgctgtctccggcaatcatttcaccgccggtaaatgcgagaagaccgcttccggcgtacatcaataaaggcattttgtccatggcggcatgaacgagcttgctgccccaaatgataatcggcaccgagatgaagagaccgatcactacaagtgtcagctcaccgtgagaagcgccggctactgcgataacattgtcaagcgacataaagatatcagccataacgattgtgcggatggctttccaaagagaagaactgcttttcacatgctgcgcatctttcttctcaatcagaagctgatagccgagatacaataaaaataccccgcctgcgcattgcaaaaaaggaacattcaataaatagaccgcagcgctcgtcagaacgattctcaagacgactgcgataaacgttccgaagatgatcgcttgctgtctttgtttatgggccagattccggctggccatcgcgatgacgacggcattgtcaccgccgagaatgaggtcaattccgataatgagcagaagggacagcaggtaatcgtgcggcatggtaacacctcgcttatagatcgattgcttgtacagctaatatatgaagcagtgcgctatttatgatgggaaccgggagaaagcctgtttttcggtgtgaaaatgcttttttatttcttttataactgttttatcataaaatagaaatataaagaatttgcgctgtcttctataaggttaagatgtggacggaatgggtaaagtgtagtaaagtactattcatcgggagcttagatgtcccttcaacatcttataaagaagggaaggttggcaaaatggaaatagaaagaattaatgagcatactgtaaaattttatatgtcttatggtgatattgaagatcgcggttttgacagagaagaaatctggtacaatcgcgagcgcagtgaagaactgttctgggaagtcatggatgaagtgcatgatgaagaggaattcgctgtcgagggtcctctttggattcaggttcaggcattggacaaaggactggaaataatcgtaacaaaagcccagctttccaaggacggacaaaaactcgaactgccgatcccggaagataaaaaacaagagccggcagatgaaaatctcgatgctttacttgatgatttccagaaagaagagcaggccgagagccgggaagataaggagcaaaagcttcagttcactttgcggttcgatgattttgaggatctcatctcgctatcaaaattgaatcttaacggaatcaaaacgaccctgtattcgtttgaagaccgatattatttatatgcagatttttatgagcaaactgatgaagaggttgaaaatcagctaagcatcctgttggagtacgcgcacgaatcatcagtcagcattcaccgtcttgaagaatacggcaaattggtgatcgctgatcatgcgttatatacaataaaaaaacactttgcatcataacaaaccgatttctctcagcagaaatcggttttttttgttctgaatgacaggatgaacggatgaaaaccgtataacggctctcatccgcaaacaggattatatcttctccctgctgaatacaacaagattcaggaaaggagaagatgcaacatgttcagtgctgtgactgccgacggacggctcattcagctggccggaagctattcaaaggaaaaagcggcggagctgagaaagaaacgctggttctgccccgtttgcgaaagtgaacttgatatcaaactgggacgggagaaactgccgcacttcgctcataaaaaaagcaggctgtgtccgggggaatccgaacctgaaagcgaataccatctggaaggaaaaagacagctttttctctggctaaagacacaagggtgcagcgtcagcctggaaccgtatctgacttccgctggacagcggcctgacttgaccgcggaaagcggagaagagaagctggcttttgaatttcaatgtgcgaacctttcggcggactctttaaagagccggacggcaggcctgaaaaacgccgggtaccggccggtctggatcatcggggcaaaacggttaaaacggatggccgcgcaatttttccggctttctgcttttcactggcagttctttgaagtccattcattttcctccttactgttttactgccccgacgcccgctccttttacaggctgcattccatcactccgttttacaccggctattcttatgccggcttaattacaatccctcttcacaaagcaaacctgaaagacatttgtcatccggaagggaggcacagcgtcagacttccctcgtggggacgtgccgtagccggcttccgaaacaaaagcggccggtttttatctgaagatgccggtcttatccggcgtcttttttacgaaagacatcaggttgcatttccatttctcccatctgaagtgtttattcccgtttcagcgggctttgtgtttgccagtcccgtttttgtgtggcagagccatttatacttgcggcttgcggaactttctaaaaaaggcacgccgatccgattatccggcatggttcatgatttgcggcaaaaaatcaggcgtaaggagattcggatgcggtatggttcacaagatagccttatcagaatggcggtaaaacaatatgctgatttcttatgcttgcaggattttttaagggaaattgagaatgaagtatatatgccctcatctcaacggaagctccctcaaacggcagaagagctgcgccggcgggatctgctcttttttggggaatgagaatgcttcatttcgttcaccctaacgtcaaggtggtggcgaatgtgaggggcgtacaagcagtttgttttcgttttttcactgtattattggtatgctcggtcttatatgccacatatgatttgacaaaaggcagtgaaaagccggaagataatcacaacacaagtttttggagaaacaatcgttttttcaattggcttgaagtaaagaaaacgagggggatcaccatgactgaggaaaataaagcagcacagctgcctgacagaagtgaagtaaaggcagagcatacatggagactagaggatatttttcctagtgatgaggcctggaataaagaatttcaagcagttaaagaattaatcccgaatttatcttcttttaaaggcacgcttgctcattcggctgataatttatacgcggcgcttacggcacaggatgaagtgacgaaccgtcttgggaaactttatgcatacgcgcatatgcgctcagaccaggatacgggaaattctttctaccaagggctgaacgacaaagccgcaagcctgtattcccaggctgccagcgcgactgcttacattgaaccggaaattctggcgattcaggaggacaagctgcaccagtttattctggaaaaagaggagcttaaactttactcccatgcaattgaagaaattacaaaacagcgtccgcacgtgctgagcgaacaagaagaggccctgcttgcggaagcctcagaagcgctgtcgtcgccttccaatacattcagtgttttaaataacgccgatattacgtttccgtcaattaaagatgaaaacggcaaggaaactcaaatcacacacggcaactttattaatttcctggaaagcagcaatcgtgaagtccgcaaaaacgcatttgaagccgtatataaaacatacggacagtataaaaacacgatggcgactacactcagcggcactgtgaaaaaagataatttttacgcccgtgtgaaaaaatataaatcagcacgggaagcggctttatccaataacagcatccctgaagaagtttacgataaccttattaaaacgatcaataaacatcttccgttattacaccgttacattgacctgcggaaaaaggttctcggccttgatgaagtccatatttatgacctttacacaccgctcgtaaaagattcgggaatgaaggtcacatatgaggaagcgaaagagtatatgctcaaaggacttgctccgctgggcgaggaatacgcgtctattttaaaagaaggacttgaaaaccgctgggtcgatatatacgaaaataaaggaaaacgcagcggtgcttattcgtccggtacatacggcacgaatccgtacatcttgatgaactggcatgacaatgtcaataatctgtttacgctcgttcacgagttcggccattccgtgcacagttactatacgagaaaatatcagccgtatccgtacggtaactacagcatttttgtcgctgaagttgcttcaacgactaatgaagcgctgctcggtgaatatatgctgaacagcttaaaggatgaaaaacagcgtctgtacctgctcaaccatatgcttgaaggattcagaggcacagtgttcagacagacgatgttcgctgaatttgagcatctgattcatacgaaagcacaggaaggcgagccgctaacgcctgaactgctgaacgaactttattatgatctgaataaaaagtatttcggtgacaacatggtgattgataaagaaatcagtctggaatggtcaagaattccgcatttctattacaattattatgtgtatcaatatgcgacaggctacagtgcggcccaagcgctgagcagccagatcttaaaagaaggcaagcctgcggtggagcgctataccgaattcttaaaagcgggaagctcggaatatccgatcgacatactgaaaaaagcgggagtcgatatgacatcgcctgaaccgatcgaggcggcctgcaaaatgtttgaagagaaactgaacgagatggaagagcttctttcgaaagtgaacccttcgtagttcaaaaaagcctgtgcataagatgcgcaggctttttttaaaaccctttaaacgtttttctgtgattcagccgatacagggcaaataatatggacagaaacagcaggggagatgtaatgtaaatcggcagcatgtgcatcatggccagcaggtttaaaaagaagaaaaacacaatcattccgatgatcaatacggtgcggagcattgatttccctccttgtttatgattgatatattctatgaaaacaagcagtcagttatgttttgtgacaaaaatatgaacattaatcttatggcttgtcaaaactcgacaagatttgatatgataaggatgtgaaattgatcacaaacaaacattacccctttgtttgaccgtgaaaaatttctcccatcccctttgttgtcgttaagacatatgaaaccgcgcttatcccggcgcggtttctttatttgcacaaaaaaagccggctccgtaaggaatcagctttttttaatgatcacaacaggtgacatcctcctgggtgccggccagagatttccaaaacagaccgtgctttgcttccactctggcgacctttttggcgaatgccagttttttcatttctttttcaacttcttctagactcaaatcataaacgagtgcgatttctttcgatgcgacaaaccggaaatattcaatgaaacattccaaaggcggcgtttcagaaggcttcggttcatccccgagcatttcgaataagatctcttcgtatacgtcataagaatagttgccgggaaccttcagcccttcatcatcatgcaggctgttaaagaacgtcaatgtcgggttgacggtgacgtccatttccgccgcgattttcatatcgcactgaagcgcttttaccgcgctttgcgaatggaggtcgcgcttgaattcttcaacatccaatttcgtcttttcggcaatctctaaaagaacgtcttcatccgtaatattctgcttggaaacaaacaggctttcctgcatgctgcggagaaacagaatgcccgcttttcttccctgcagttcggccgcttttaaagcaagtgcggcaaggtagggcgatgaaagaggctgatcctgctcaagccaaaggcttccgtcacagggcatcccggaacggttcgcaattttttcccaagcttcggcaagaaggtgttttttccgcttttgcttattcagcgatgtaatactcgcggaaacaatgatccgcagcgtaaaaaaacgtccgtatttgatttttaatttttttatgacgggctccagcgaccagcattcaggacataaagggtcgacaaacatgtaaatttcgagcggtttttttggatgtccgtggcaatgggcgaagtattgctcatgctgataattcgtcaatatgatcgatcctccgcttctgactggtttaccatatgcctggccgtcagttccagacgcccgtacagaaattcacgaatatcgccctccagcccgacctgatccatcgctttgctcatacagcttagccacgcatcagccctctcggccgtaatcggaaaggggagatgccttgctctgagcatgggatgtccgtgctcttcagtataaagaggaggtccgcccaaatactgggttaaaaattgcttttgttttctggccgtttcagtcaaatcacttggaaatatcggcttcagcaagggatgagacgagacacgctcataaaaagtatcaacaagttgcgatagaagttcctctccaatcgcttcatatggtgcgttaaacgattgtcccatgttgactactcctttatatggctaataggaatcataattcccattgcgaatttatctttcagttttactatcttcagttactgtatattttagcaataacattttatttctacaaacaaagtgcctttctgtcaggcgcttgtatttcatatcatatcacatcgccttcattcatgtgtaagatttcactccgcaaaaaaaccagagggcgaaggaagcctctctggtttacgcgtaatactgtttggttatgtttttgacatattgctgtgtttccttaaacggcggaatgcctccgtaccgatctacgttgccggggcctgcgttgtaggcggctaacgccagagatacatttccgtcgtatttcgtgagcatctgctttaagtactttgtgccgccctcagcgttctggacgggatcaagcgggtttgacaccccgagtgattctgccgtggaaggcatgagctgcatcagtcccattgcccccgcaccgctgaccgctttcggattaaagcctgattcctgtttaataaccgcgcggatcagcttttcgtccactccgtatttttcggccgctttctgaatggcgctgtctattgaaaagtttccggtgctgatatcagaagccgcatccggagactttatgcccggggaatcggtctgtgaagcagccgcggagccggatgaaacgggaattctcggtgaataagaagcgtgagcggtccgcacaccgtttaaaattcctgattccggctgctgccggacggctgtgtccgtatactggctgagaagcgcgctgaaattggcaagcgggctttctgaagattgtccgcctgaagccgtgcttgtatgagagattgattgcagcgccattgattgcagctggagaagggccgcccaattcgttatattcactgtgtcattccacctttttttgtttctgttcataaaaacgctggattttatttttcgtgatccgctctggaatgccgaattgcttgagcaattgttcaaacgcccgttttccttcatcccagtcagcagcttcgaattccaattcaaagtcttctttctctaaatatcggctgtgatctaaaatgattaagcctttttctgattctttttccgcgcgtgcggtcgacagcgttccgaaatagcaaatgtgttctgagttgattccgagaccttccagctgacgtttgacggggccttccggaatcttgaagacgtcaagatcaggtgccgcaagctcttggtgggtttccagcagaccgaccgcggcaggctcttttaacgtcagaacgaacgcgccgtctttttctcggatgcggagtgctgattttttttgtttcagggaaaaatctttcgtgtcgaaataatgattgacctgctgtttaaaatcatgttctttcatgcagagtgcttcactcagcttcagaaattctgattttgtcagcaggtttttgaattcaatttctatttcttgggtcatgacagtcttcctttcaggacgaaaaattgtataattcccattatctctttagaggttacgtttatcaatatcgaccttgatatgataaaataaatgctgtactttgttaaaaaaggagaacattatgcaaaagagaattgaaatccaaaatgcatcattaacagaagacgcgctccgcttgaagtgcggagaggacttaagcggagcggaacgcaaagcctcaggtcaaatgcttgttgattccgatcactttgcttttgtatacatacttgaatcagctgactcttttgaatatgtcattataaaagaacatatctggccggatctgaaagaagccttagaccaaagaaaatcggcggtccttgaggccggcggaaaaacggttgaactttcagggctgcatgaagaactcgattatcttcttgaaaatattaaagataatgcaaactacggagatatggaagaaaaagtgaaaagcgtatttctttagaacaggttcggaattgggggatgtacgatggatgacaaacaatgggagcaatttctagcgccataccgccaggctgttgaagaattaaaggtgaagctgaaaggcgtcagaaccctttatgagtatgaagatgaccactcaccgattgagtttgtgacaggccgcgtgaagccggtggcgagcatacttgaaaaagcgagacgaaaaagcataccgcttcatcagattgaaacgatgcaggatatcgcggggctgcgtattatgtgccaatttgtcgatgatatccagatcgtcaaaaatatgctgtttgccagaaaagattttaccgttgtcgataagcgggattacatagcagagcataaggaaagcggatatcggtcttaccaccttgtcgttttatatcctttacaaacaacgtccggagaaaagcacgttcttgtggaaatacagattcggacgcttgccatgaacttttgggcaaccattgagcattcactgaattacaaatacagcgggaacattcccgaaaaagtaaagctgaggctgcagcgggcctcagaagccgcatcccggctcgatgaagaaatgtcagaaatccgcggagaaatccaggaagcccaagccgcgttctcgcgaaagaaaaaagcgggagaccgccagtaggaaaggaggggaatggcatgaaatttgccgtttcttcaaaaggagacgaggtttcagatacactgaaaagcaaaatacaggcgtatttactcgattttgatatgaccttggatgaaaaagagccggaaatcgttatttccgtcggcggtgacggaacgcttctttacgcatttcacaggtacagcgaccgtctcgataaaacggcgtttgtcggagttcacacggggcatttgggtttttatgccgattgggttccgcaggagatagaaaagctcgttctggccattgccaaaacgccgtatcataccgtggagtatccccttcttgaggtgattgtcacttatcatgatgaagagcgtgaggagcggtatctggctttgaacgaatgtacgatcaaaagcatagaaggcagtctcgtcgctgacgtggaaattaaaggccagctgtttgaaacgttcaggggagacggtttatgtctgtccacaccttccggaagcacggcttataataaggcgttaggcggcgcaatcatccacccttccatcagagcgattcagcttgcggaaatggcatccatcaacaacagagtgttcaggactgtcggctcgccgcttttgcttcccgatcatcataactgtgtcatcaaaccgagaaacgacgtcgactttcaagtcaccattgatcatttaaccttgctgcataaggatgtcaagtccattctatgccgtgtggcaaatgaaaaagtcagatttgcaagattccgcccttttccgttttggaaaagggtgcaggactcctttatcggaaaaggcgaatagaaagaggaaacggattggacaacttttttatccaaaagaacatgactgcccgggaagccggcatgacggtaaaagaatatacggcgcagctcggcatttcaaagcggcttctcgctgacattaaattcggcgggggagacctgcttgtgaacggagagcatgtaaccgtccgcgccgtgttagcggaaggagacgtgcttaagattgaatttccgaaggagcatgtgagtgaaacgcttttgcctgagccggttcctcttgatattctttatgaagatgaccatgtgcttgtggtcaataaacagccgtatgtctcctcaattccatcaagagaacacccgtcggaaagcatcgctaacggagtgatcagctactaccgaaaaagcggcgtacaatcaacggttcatcttgtcacccgccttgacagggatacatcgggggcgatgctcatcgccaaacatcggctttcccattctcttttgtcggcagcgcagaagaaggggcttgtcagcaggcggtatctcgctgtcgtacacgggatcatgctgcagaaggaaggaacggtggacgcgcccatcggaagaaaacacgacagtattattgagcggatggtaacgccggagggacaacgagcggtgacgcattttcaaacggaaaaagcgggacatgcgtttacgcttgcagccctgcggctggaaacggggcggacgcatcaaatccgggtgcacatgagctacctcggccacccgttagtcggtgatacactgtacggcggaaaaaatgagggaattgcgcggcaggctcttcacagtgagcggctttcattcgtacaccccatgaccggaaaaacgctcgtttttcacgctccggtgcctgacgatatgaaaacattaattgaacaaatgtaaagcccgaaccgtttgccggtttcgggctttttttcatgcctgccttccgtgatcctcgcgaaatcgtgaggcatcatagggcattgagctttccacagagacggtttcatgctccggaaagcgaaagcctgtcagttgattgccgaagacgcatcctgtatcaatgttgattgtacggttgacgatccgggggcgttttaccggggtatggccgtaaacaatccatgccttgccttcataagcggcggcccagtctcttctgacgggtctgccgtcgggatacgtttcacccgtgatatcgccgtacagaacaaattcttttaccttacgcgagtatttaccgatatcgtcagcttttatgccggcgtgggcgacaacgagatcgccattatgtaaaatgtcataaagcggcgctgactcatataatcggataaattgtctggagacttccgttctgtcggcgggagacagctctttcagttcggctgccgtcgtttccagtccgtgcatcacttttacggggtttccttttaagtaacgatacagtttgttgcaatgatttcccgggacataacggacggctcctttttcatatgcttttgccacaaaacgcatcacttctacggattttgggcctctgtccgttaaatcccccgcaaagacaagcgtcctgccttcagagtgaacgggcgttccgtctttgacttcatatccgagcttttgcattaacgcgatcatttcgtcataacatccgtgtatatcgctgatgatgtcataagccattcgtgtctgcctccttattaacgtttttttatttattatggggctaattcctatacctaattacgctgtttttgcacaaattaaaaaaagaattaaagaaataaagccttatcacttttttttcgcgttcagccttgttagaatatgcgttatgtttttaaaaaaaagtaaggtttcgcccgctttaagcgggcttttataacccttgttttaaggaggtatttacgaatggaacacacatcagtcgcatctttagtcgtcgttctgatcgtcgcttttttgacgccgctccttttacatcggtttaagctcagcatccccgtcgtcgtcgcggagatcatcatggggcttattatcggaaaaagcggcctgaatcttgtcgttcagggagacacgtggctggagacgctgtctgttctcggctttatctttttaatgtttttaagcggcttggaaattgatttttcttcatttgagaaagggaagaaaaaacaattccttccgaatggcaaggaagcgcccaacacgttttctgccgcactgattatctttttcggcatctttattttatcattgctgctgtcctatgcctttgtattagccggttttattcaaaacgcatttttaatgacgcttattatttcgacgatatcactcggtgtggtggtcccgactttaaaggaagaacggattatgaactccaatatcggccagatcatcctgcttgtcgccgttatcgcggacttggctacgatgattctgctcgctttcttctcttctctttacggagaagacagcggaaatatgtggcttctgttgattctctttgccgcgggggtcgtgctgtatttcttcggcaggatctttaaacaccgttcatttgtgcagtcgatgtctaaaggcaccgtgcagatcggcacgagagccattttcacactgattatcgtgcttgtcgctttatcggaatctctcggggcggaaaatattctcggcgcgtttttggcaggcgttctggtatcgcttctgtctccgaataaagaaatggtggaacagctggattcattcggatacgggtttttaattccgatctttttcgtcatggtcggggtgaaattggacatttggacgcttttccaagatccgaaaacattaacgatgattccgctgcttctgcttgcgctgtttatcagcaaaatgttcccggtgttttacttaaagaaatggtatgacaaaagaaccgtgtttgcttcgggctttttgctgacgtccacgctgtcgcttgttatcgcggcggctacgatcggagaaaggctccacattatcagcgccaatatgtccggcgcgctgactttagttgcggttattgccagcatcatcacgccgatcggctttaagaaattatacaaacggcaaagtgcgccgcaggaaaaaaagcgcattacatttatcggcgccaaccaaatgacgcttcctgttacgctggaattgcccgatgaggaatatgaagtacgggtcgtccatgtgtatcaggaaaatgccggagaagcgcttgcggaatctgttttttcggttgacacgatttctgattacgagcccggcacgcttgagtcgcacggtattttcaaaacggatattcttgtcgtggcgacgggaaatgaagatgtgaacgctgaaatcgccttaatagcgaaagagaaagggactgagcgtatcatcgcaagcgtcggctcggttgagcatgaaacaaaactgaaagaagagggcatcagtattttttctatccttctgtctacaaagacgctcttgcgcgcattaattgaggcgccgggcgtgatgagcctcctgacgaatgaggagtcttcgttatatcagatcaatctggaaaacccggcgtataacggcatcattctgcgggaatttccgctgatgggcgatgtgattttcgtccggattttcagaggtgtggacagcatcgttccgcacggagacacgcggctgaaaacaggagaccgtctcatcgtcacgggctcgcgcaactacgtgtcggaactgagaaaaatccttgaagcttgaccaaattgcaattcgtgataatatagaaggcataacaaataaatcattaatcgtatgaccactaggggtgtccttcataagggctgagataaaagtgagacttttagaccctcataacttgaacaggttcagacctgcgtagggaagtggagcggtatttttttggggttccttttatccatttaaattccaaaccacttttccgatgcgggaaagtggtttttttattttatcaggggggaagacatgatgacattttctgaagaatgcagactggcggctgccgaatggtgggacggaagttttgttcatccgtttgtaacgggaatcggtgacggaagcctgccgatagaccgtttcagctattacgtgctgcaagattcctactatttgacgcattttgcaaaagttcaggcgttcggcgccgcatatgccgaagacttgtttacgacgggcaggatggcgggccacgctcaagggacatatgaagcggaaatggcgctgcaccgcgagtttacggagcttttagggattacggaagaagagcgtgcggcatttaaaccggcaccgaccgcctattcttatacgtctcatatgtacagatcggtgatgagcggcaattttggagaaatattagctgcgcttctgccctgttattggctttattatgaagtcggcgaacacttaaaggagtgcaaaccggagcatccgatttatgaaaaatggatcggtacatacggcggagactggttcagacagcaagtcgaagaacagatcagccgttttgacgagattgctgaaaacagcacagaggacatccgcgcgaaaatgaaagagaattttgtgatttcaagctattatgaatatcaattttggggaatggcctatcaaaaagaaggctggtccgagaagggcggaaaagaggtggaatcttttggagctgcacgcggtaactgataatcgcaaacccgttgccgagctggccgaggatattctttcgattcagcgcgaagtaagctttatccatatccgtgagcgggataaaacagcgggagagatcatgcagcttttgtcccttttgaaaaagggcggtgcggataaggacaaattgatcatcaatgacagggcggatatcgcgctttttgccaatatacaccgtgttcagcttccgtcccgcagcttttccgtaaagcaggtgcgaagcagatttccccatcttcatatcggacgttcggttcattcgctgaaagaagccatccaagctgaaaaggaagatgcggattatgtggtgttcggccatgtatttgaaaccgaatgtaaacaaggacttgaagcaagaggcatcagcctgctttcagagatcaaacgcacgctttccatccccgtcatcgcaatcggcggaatgacactgcagacgatcggacacacaaagcaggcgaagccggacggaattgccgtcatgtcaggcattttctcagctgaaaatcctgaggaggcggcaaaacggtatgcacgcgcggtaagggaggccgattatgaagaagcactatgatacggcggtgatcggcggcggaattatcgggtgcgccatttcttatgagctggcgaagacgcagcagaacgttgtcttgcttgaagccggagaagtcggccgaaaaacgacaagcgctgccgcgggaatgctgggctctcatgcggaatgtgaaaaccgggatgcgttttttgattttgccatgcacagtcaaaggctgtatgaagcggcggggcaagagcttgaggaagcttgcggcattgacatcaggcgccataacggcggaatgcttaaactggcgtataccgaagaagatatcgcccgtctgcggaagatggatgatctgccttccgtcacctggctttcagcggaagatgcccttgaaaaagagccttacgcttcaaaagacattctcggcgcaagttttataaaagacgatgtccatgtcgaaccgtactatgtctgcaaagcgtatgcaaaaggagcgcggcgctatggcgctgacatatatgagcatacacaagtcacctccgtaaaacggatgaacggagaatattgcatcacaacgtccggcggggatgtttatgctgacaaagtcgcagttgcaagcggtgtatggagcggccggtttttcagccagctcggcttgggacagcctttttttcctgtgaaaggagaatgcctttccgtgtggaatgacgatatcccgctgaccaaaaccctttaccatgatcattgttatgtcgtcccgagaaaaagcggccggcttgtcatcggcgccacgatgaaacacggcgactggagcgatacgcctgacatcggaggaattgaggccgtcattgcaaaagcgaaaaccatgcttcccgccgtcgaacatatgaaaatagaccggttttgggcggggctcaggccgggaacaagagacggaaagccgtttatcgggcggcatcctgaagacagcggcatcatcttcgccgccggccattttcggaacggcatcctgttggcgccggcaacggctgaaatggtgcgggatatgatcatggaaagacagattaaacaggaatgggaagaagcgtttcgaatcgatcgcaaggaggctgttcatatatgatccttcagctgaacggaaaacaaattgattggaatcgaaaagaggggacggttcaggatttgcttgaatcgtaccagcttgatcaaagaatcgtagttgtggagagaaataaagaaatcattgaaaaaaagaattatgaaaatacgagtttgtgtgaccgcgatgtcatagaaattgtccattttgtaggaggcggatgaggatgttaacaataggcggaaaacagtttcagtcaagattgctgttaggaacgggaaaatatccgagttttgagattcagaaagaggcggtggctgtctcggaatcagatattttaacctttgcggtaaggcggatgaacatctttgaagagtctcagcctaactttcttgaacagcttgatttgtctaagtatacgcttctgccgaatacggccggcgccgcaacggctgaagaggcggtccgaatcgcaaggcttgccaaagcttcagggctttgtgacatgataaaagtagaagtcatcggatgcagccggtcacttttgcctgatccggttgaaacgctgaaagcatcagaacagctgctcaaagaggggtttatcgtgcttccgtatacgtcagatgatgttgtgctcgcaagacgtcttgaggagctcggagtgcatgccattatgccgggcgcttcgccgatcggttccggtcagggaattttaaatccgctgaatctatcctttatcattgaacaggcgaaggtgccggtcattgtcgatgccggcgtcggatcttcaaaagacgccgcctacgcgatggagctcggggctgacggcgtgctgttaaataccgctgtgtcaggcgctgatgatccggtcaagatggcccgggcgatgaagcttgccgtagaagcgggccgcctttcttatgaagcggggagaattccggtgaaagattacggaactgcaagcagtccgcgagacggtcttccggtatgacggacagatattccagacaggagctgtttcagccgatcggtccctccggccaagagaagctccggtcgtctcatgccgtgattatcggcgcgggtgcgcttgggacggcaagtgcggagatgcttgtcagagcaggggtcgggaaggtaacgatcgctgacagagattatgtggagtggagtaatctccagcgccagcagctctataccgaagacgatgtcagagaggaaatgccgaaagccgcggcggctgaaaaacggcttcgatcaataaatagtgatgtagaggtcgagggatttgtcatggatgtcactgcggaaaacgcacccggattgattcgtgacgcctccctcatcgtggatgccgccgacaacttcgaaacaagactgattgtgaatgatgcggctgtgcagaaagggattccctttctgtatggcgcctgtgtcggcagctacgggctctcttttaccgtcattcccggtgtcacgccgtgccttcactgtctgcttgagacattgcctttaggcggtatgacatgcgatacggcgggaatcatcagcccggctgtattgcagacggccgtttttcaggcagcagatgcgctgaagctgttaacgggcggatctatcgagcatgttctccgttcttttgatttatggaaaaatgaacggtcagaaatagacgtcacccgtcttaagtcggctgattgcccaagctgcggcacgaacgattatccgtttttatcctatgaaaatcagacaaaagcggcggttctgtgcgggcggaacacggtgcagatcagagcggggatctctgaacagtttgatctgcaaaaacttgcgggacagctcagacggacagggcttgatgtttcagccaacccgtatttaatttcgttttgcaaagacaatttcaagatggtactgtttcgtgacggcagagcattaatacacggcacaagtgatatcagcagagcgaaatccttttatcataaatggatcggataatgcgaaaggagagaaaaacatcatgagcatatgcaaagcattgacgattgccggatcagattcaggaggcggcgccggtatacaggcggatctcaaaacctttcaggagctcggcgttttcgggatgtcagccattacagcggtaaccgcccagaacactttgggcgttcacggcatttatccgctcacccgggaagcgctgggcagccagattgacgcggtggcggaagatttgcggcctgacgctgtaaaaacgggaatgctgtggagcgcggaaatgattgcggaaattgcggaaaaaacggatcagtacgggcttgatcatgtcatcaccgaccccgtcatgattgccaaaggaggcgcttccctgctgcgtgaggaatctcaggccgcgttaaaagagctgttaattccgcgcagctatgcggtgacgccgaatgttccggaagctgaggtattgacgggaatggaaatccgcacgtttgaggaccggaaaaaagcggccgaacgcctttgcaagcttggtgcaaagcatgtcatcataaaaggcggacaccagcctgaacaggggaggatcgttgatttattatttgacggttcgtcttttacccaaatcagccacgcttatattgacaccaaacacacccacggaacaggctgcacgttcgcagccgcgctgacggcggaaacggcaaaggggaaaaacattcagaccgcgtttgagacagccgtcaattttgtgcgggaagccgtggaacatacgcttggcattggagagggacacggcccgaccaatcattttgcctttaaaaggaacagtctgcagacgagataaaaaagagaccgcttcaacatccgcggtctttttcccatgctttcaatctggacaaggttatgatatgataaaaattaagatcaggtactaaaactatgtctttaagacgattacaggaggctttatacatatgaatttctcacttgaaggccgcaacatcgttgtgatgggcgttgccaataaacgcagtatcgcatggggaatcgcccgttcgctgcatgaagccggagcgcgcctcattttcacttacgcgggagagcgcttggaaaaatcagttcatgaccttgcggctacattagaaagaaatgattccatcatccttccgtgtgatgtgacaaatgacgctgagatcgaaacttgctttgcgagcattaaagagcaggtcggcgtgattcacggcatcgcgcactgcatcgcgttcgcaaacaaagaagagcttgtcggcgaatatttaaatacgaaccgcgaaggattcctgcttgcgcataacatcagttcttactctctgacagcggtcgcaaaagcggcgcgtccgattatgactgaaggcggaagcatcgttacactcacttacctcggcggagagcgcgtcgtttcaaactataacgtaatgggtgtggcaaaagcgtctctggatgcaagcgtcagatatttagccgctgacttaggaaaagaaaacatccgcgtcaacagcatttcagcaggaccgatccgtacgctgtctgcaaaaggaatcagtgatttcaactccatcctgaaagaaattgaagagcgcgcgcctctgcgccgcacgacaacacctgaagaagtgggcgacacggctgcattcttgttcagtgacctgtcaagaggcatcacgggcgaaaatcttcacgttgattcaggattccatattaccgcacgttaaataacaagcagtccctttcagggattgcttttttctttcttctgattttaatcattccgtcatataaataaaacatgacagaatcggagggatgaagatgtcaaaacaaaacagaaacgcggaaaaaaaaccgctcatgtatattgttcaggcggattattcagacacgcaatcatcaatgcaggacatattaatcaaaaaaaggaaagcgcctcagccgccggaagaagagccgatgcatggaaagcgggaggaagaatgtcaaactcagcctgaaggagcagtggctgtcgaaccagaaaagcaagtacctgaacagcacagccgcgcagaagaagccgttcaagaagttccggcgcaagcggagcaggacactgccaagcctgacgccgctaaaaaagagcctgatgccgctgaaaaagagcctgaagcggttcacaatgccgccccagaggaaaaggttccgccaaagcgcgtgaaaaagccgatgagcagaatgtccattcttgaaaaaattgatttcttaacgaagctgccgcataatatgccgcggaccctttgtctgatagaagccaacgggaaaacctacagaggcgtaatcgtcggcagaaaaaataatgcgatcttcctgcggacgacaagcaacggagcgccggcagaactcgcaatagacgatattacttcgctgcatccgcttggattttaaccatacaaaaagctgcctgaattctttcatccggcagcttatttttatgctttttgatttaagaatgtgtgcggttgatcagtctcgggttcaggcaattgatggcgcagaagctatggagatcgacttcaacgcaatagttcgttttttctaaacggaatacatcgcagagagagtctttatctgtaaaatcaagaatgtgcttatgctcgtcaaaagcaataagcaggcttaatgtggcacagccgtcacagaccctttcaactctgaaaaaaacggtattaaagcacggaccgttatccagctcgcccacgtttccgaatgcggtgaacggtttcgattttgaggtgaagatggcgaacggcactgtatcgcctaatgtataagccggagataaaaggttagaataacagcctgtcgggcaatcttcttcaaccgcattttgcaggtcttcaatattttctaccgcttcacgcacacagtatgttgtatgcttgctcataatatccctcctgacttcacgttttaaatggtaccggtttaaacgatagcggagagtcagccgcccggaagtccgggcgggctgatgattgcatctgtaatagaaggttggaaggggattcttctttaggaaagatgcgaatcaatgactatccgtgatgctttttctctttgtgcggcgcaggccggttaacaagctcgggtgaaaggcactgaatggcgctgaagcagctcagatcaacttcaatgcaaaattctgttttttctaaaccgaagaaatcaggatcacaaggatggcagacgctgagggtgtcgccgtgcacatctacggggcgcaatactgaaagcgtcgcgcagcaatcgcatagtctttctacacgaaagaaaatggactcaaagcactggctgtcatccgcaaatcctccgacgttcccgaatgtggagaacaatccgccttttttatcaaatacgagaaacggaatggtgtctttacctgcaatcgtcgggctcaaaagattcgtatagcatccagtcgggcattgttcttcaacagcctcttgttctgctaaaatcttctcgactgcatcgcatacacaattttcatctcggccatggtgttttccgcagctcatggatttcagctccttcttttagggtatttgacttttgtctttaacaacatatgtacgcgagcctcacttggtgtgggtgaacgtctatatattcatcatatgcggagaaaataagaaaaagcagagcatttttagctctgctttttctttttagaggacgagggtgatgactaagatggcaatcagtgtatttgttgctgttgagatcaatgttgcgatatcggcatctactgttgtcacgtttacgccgcgggagttttcgatgagcagtttttgacggttgatttgtttgttagctgttagctgcaataagtcttgtgcgaccaattcagcgatgactccgtcagcgattgaagtgagagtggccgttacgactgctgcattaatcgctgtcatgactgaagtgactgcctgaatatctgtcgatgtcacgttaatatcacaagaatctctgataataatcgcttcttcagaaacttgtttgttgagattcgcctgtgccaggtcttggtcgatgaaggcattatcttcgccgaacccgtgtccgttacagcaaacattacatcttctgccttctttttcttctttttcttctcgcggatgttcacattcaggatcaagtgcaacccaagagtatggtctgctttccatatctattcctccttttcttttactaatattaaatgagccggccccttactttgactcaggcatctatcctgataaaaatcactatttttagttattgaccgggattttggcgtctttgccggagctgttcgattaattgttctctgcgggtttgctgctttgtctgctgttcttgcgctttctgctcttttttctgtttctggctttcaagaaaagcttctgatttcgcctgcatgtctttcactaatgcgatcagcatttctttttcttcatcaggtatttcccgcattttatcttttgtcacgccgtgttttttgaagacattgctgacaagcacttttaaaagcggatccacttctggtagatttgcgagttcttctttgaatttttcgttatctgccatttgttctcacctctattttaaaaatttgaaaagaaagagttaaaggatgtctagttcagcaaaaagtatatttaatagctgaaacaaagtttgtacaaaggccatgatatcgtctgctgtcagtgtgattttaatattgcggctgttaatgacttgaatgagggttcgcttttttatttggcaatcctcgaggatcagcagttcggttgccatttgatcggctgtgtcttcatctgcgatcacgagctgtgtcgcgaggataatcgccgcagtaactgaagcttgtatagaaagagcagccgttatatgtgttgtatctattgtgacattttcgcaatcaatcacttcgatcttctgctcgaattcgttagataattgttcgaatatttgcggttgcagtgtttcgactttttcttcaaacgacataaccttcactcctttctcattcatactctatataatgcaaatgaaacgccgagcggaataagaaaaacaactaaaccgcacctatttttttaccggacaaggtgcgattcatgaagatcagggttttcgcatatgtataaagaggtcaagttttgaaaaggagtgaacaggtggttatcaattggctttcatttattctgttatcgtttgccgttttccggctggccaggcttttcgtatttgacactattatggcgccgcttcggagcctttttcacgaggaaaaaacagaaaccgcacccgacggcacgacagaaacctacattgtcataaaaggcaaagggatcagggcatttatcggtgaacttctcagctgctactggtgtacgggcgtgtggtgcgccgcctttttaattgcggtccagattgtggtacccgaggctgcgcaatggctgattttgctgttagccatagccggcgcggccgggatcattgaagctgcggtttctcgtcttctgcaggaataaggcggttccaccagcaacttaccgtcactttcggcataaactggcatatatgacataaggaaaggaaggatcaccatgagtcaatcaagcaaaccttcccaacactctccatacaaatcaactgtgcatcagccttacgaaaaaaaaattaagaaaaaaggctgcggctgcggccaaaagaaaaaaccgaaatagccgttttctaaaaaaccggagcttccggtttttttgttttttgccgaacgccggcctctgttcggcatagatcataggaggaggggatgttatgaatatatttgaatcattcataaacggtaaataccgccggcacaatcaaaaccagctggagcatgacaaatatatcttatctattgaaaaacagctgtctgagtttgatgaagcgggatcgcgctttgaggaatggatagatgtgtttgccgccgaaacagaagcgaaactgaagaaaaatgagcattctcactaaaatgaatgaaatccgcaccggccctatgcatttatccaagccaaacaagtcggctcacatagagtatagagagtaaaggaggtgcttagatatgggattcggatatggcggattcggcggcggctacggcggttatggcggctgcggcggatacggaggcggctatgtcggaggcggatacggctcaacatttgttcttgttgtcgtattgttcatccttctgatcattgtcggtgcatccttttttggctaaaccttagcaagaccttggataagcgcgggaccgttcagtcccgtgcttccctgatgtataaaggagtatagagacggggcactcggaattttttccttgtcttacgggcacatgttccgctctttattcatacaatatcgtattactccacaaaaggaggcacaccatggataatcaatttttcaaaaatattgagaagaaaacaggcgtcagcatgaaggatgtcatgaaccttgcaggatcattgcaaaatgccaatttcaaagatgaaaacacggtgagaggcgtcattcagaaggtgtcccagctggctaacaagcgtgttccgaaagaattggaagacaaaatcgttcaatctattacaagcggtaaagagaaacttgattttggcaccatttctaaaatgctgaacaataaataggcgtcagccggccttgctaaaaaggcctttttatgtgagaagaacccggcagtgatctgccgggttctttatatcctgagtacgctccgtctgtccgtccgaagaaggggctcgagaaatcttgagctgcgcgctgtttttccccgcctgtacgcgggacaagatacatataaatgctgcatggcccttgtcattgcgacatacagaagccgtctttcttcttcgagcggagcgggatcgccctgtctcgccgtctcaagtgcgaagtcatgggggatcgagccgtcagccgcgcctaaaatatagaccgtattgaattcaagacctttagagcggtgaatggtcagcagttcgacgccgttttcatcggttttcagattctcagcggcgcgcatatgatcgacatgcgcaagaaaatcaggaatggttttgaattttttggcggccactttgacatccctgagatcatcagagcctttttccagtttgtttccctcattgccccgtttttttaaatactcggaaaaacccattttgctttctgcaaaggtgatggcttcaaccggcttcattgtccggatgcttgcgaaaaacggaacgatctgcttgatcttccctatttgaaaaggcttcaggtcaggcagtttcgtcagtgccttaatcatcgtgcaatcttccgtaattgacagcgcctttaacgtttgcagggcggattgctttaaaaataaggcgggcagcaggtctttcaccgcatccggatcatcttcattctgactcgcatataagtaggcgaggatctggcgtacgattctgcggctgtagaacgtctggacgcccctgtcggcatgatagggaatcgatgattgatgcagtctttcataaatggcccgtccggcgctgtttgtccggtaaagcacggcaaaatcgtcaggactcgccccgttttgaatcttctctttcatatccgaaacgatcatggtcgcttcttcttcttcatcgtaaggaaaaaacatcacgggattgtgaacgccgtttttgacggcagaaagtgttttttcataccgttttttatttttctttacgacggcatgagcgcttgagacgatcggatgcggcgatcggtaatttgccgttaagtaaatggtctttgctgccggataatctttctgaaaatctaaaatgaaagacgggctgctgccgcggaacgcataaatggattggtcgtcatcacccacgcagcacaggttattctctgggcttgcgatcatttgcataatgttgtactggacaggattgatatcttgaaattcatcaatcaaaatatgagaaaatctgttttggtactgcgcgagaatatcaggccggctttgaaacagttcataacagccttgggccatgtcatcaaaatcaaattgccgtttttcctgcttctgccgttcgtaatgttcgtagagcctgtacacttttttctcccagtcgtccgcaagcggaatggtctcatgggggagatacgtgtttttccagcagccgataagctgaagcgcctggtcgacgggaaactctttttcatccaagttttcttcatagagcgcctttttcacatattgctctttttgccactccatttttaaaagctggctgccgttccattttgaagaatcataatgacagagtattttatagaaaaaactgtggaatgttccggtcacgagacgggagacttttccggctgccagaccgtactcatttgccatccgctctttcatttcggcgacggcttttgtcgtaaaggtcacaagcagcatattctcaggtgaaatgccgaggtgttcaatcatatgggcggcgcgtgctgtcagcacccttgtttttccgcttcccgctccggcaagcactaataaaggcccgtccgtttcagtaactgccttcatctgttcacggttcaggccgatgccggggaacaaagatgtatcagccgcctcggatgttggtgaaaacggttcggccgcaggcacttttttcgggcttttccattctgagacgatcggtttcggattctctgaaatcgcttttcctttcggcaggcggaacatgccggcttccttatactcttctttttctttctccgctagtggttcctcggccgcgcatgctttttcacaggcggtgaagtctcccttttgccggtgataaaatgccggctgctctaaaatcgaaagcctcatcaagacgggctgctcacaatgtgcgcaaaaaatatttcctttctgagcttcttcaaaaaggaattggtaatgttctctagaatatgtatgtaaatgtatcgttcggttattcagtcgggcgcatttcaaaaaggggtcctcccattaaaaggtgttcatccatttgatagacaaagaatatcataacaaaagaacagcgtttcaaaaagtaagattaagggaaatgaaagcgaaggggaggggtacatatgatttatgcaggacggattcaaaaccagcagtattctcaatacgcaaaccgggcagcgggttataagtctgattatgccggcattacgaaagcggccgcccttgccaatgacagggtgtacagagaggtggagcgccgccaggaaaacaccgcagccgcagaaaagaaagtacatgaggaaaaacgtaagcgctctctttcccgtctgccgcaaatcatgggaaaaggccggttgataaatcaatacgtgtgaaaaagcccggatatatccgggcttttttgagtcgtatatatgaaagatgcggaaaggaatgattcaatttgagaaagctttcattatgaattgcggggttatttctattcggcctctttactgccggaatgaaaccggcacacgcggcggagagctccgcagcaaaagatgtcactctcacacagctggcgccgcatgtttggatgcatacaagcaccggtacggcagacggaaatcccgtccctgcgaacggattgcttcttgagacttccaaaggaatcgtactgattgatactccgtggaatgacagtctcacagagcaattaatgacacaaataaaaaagcggtttcccggcaaaaggatgaccgatgccattgtgacacacgcccatgacgatcgcatcggcgggctgaacacactgtacaaatacagcgtaaaggtgcacagcacgaagctgaccgccgacttcgcccgagagcagggatatgaccggccgctcggagatttgaaaaacgtgacaaagctgcagtttggcgatatgaaaattgaaacgttttatccgggaaaagggcatacagaagacaatattaccgtctggctgcctaaggataagctcttattcggcggatgcttaatcaaggctttagaaacaaaggaaatcgtgcctactccgggtttttatccggatcagtggccgcgcgccgtccgcaaagtcatgaaaagatatcaggacatcagcattgtcgttccggggcatggcagtccgggggatgaccgtctgctgccgcatacgataagccttctgaaagaaacgtaataaagaagaccggcgctcccattacggagtgccggctttttttatctcttcctgattttcataaaactgaggaaagcaagtgcaagcgccaaaacggtatatcccgctatcggccaaatatgctgatgaaaggaagaataatctccggatatgacttcctgggccagctcaatcgagtgaataaacggtaaggcataagcgatatgtttgaatgtgtcaccgagcaggctcacctccatccaagccccgcccagaaattgcacgagtgtaatataaatcgttccgatacctgaaatttgtttgtccgtaaacacagcccctaaacataaaccgaagaaaacggacatcatcgcaatcggcagcaagacagcgatacctgcgagaagattcatccactcggcggataaaccggaagccgctgctgcgataaaacaaatgacgatttgtaaaatggctaacggcagcatcggtattgcataaccgatgacataatcggctgtttttaaaggggaagcaaacaaacgggtcaaaagggcggtctgtttgtcttttgcgatcagcaatgcagagaacatcgtaaggaaagcgaaaccgaaaacaatgagtccgggtgctaagtgctgaattttaaaggtatcaagcggcgcatttttttcaatcgccgtaaacagaaacaatagaataacaggcagtgcgattccaaggataatagacagggggtcacgaaaaatttctttgcggttgcgaatggcgaaatcaagcataaagacccgcctccccgtcacaaatcgctaaaaaggcatcttcaaatgtagctgaatgagtttgctttttcagagcctccgccgtacccagtgcttttaaagtcccattttctaaaatgcaaatacgatctgccagggcttcagcctcttctaaatagtgtgtcgttaaaataatcgtcatgtcaccctttaatgcctcaagatttttccacaactcgcggcgtgaacggacgtcaagccctaatgtcggctcatctaagaaataaatatccggcttggtgatcattcccattgcgatgctgaggcggcgctgcattcctcctgataatgttttggtttttgctctttctttctcttttaattgaaacaattcgagcatctcatctgttcttttttttgcttcttttttcggaattccgtagactccggctataaactctaagttttcccgtacggttagatgaggagcgatggctgtttcctgcggggacatattcaatttcggttttattttatccaaatcagtcaaaatactgtgtccaagcactgatgcatcaccgttatccggagaaaggagtccgcaaagcatgctgattaatgtcgtttttccggctccgttctcaccgagtaaagcgaaaaattcccctttctcaactgagaactcaagacggtcaacggcggcggtttctttataatgtttcgttaattgcttcagctcaatcgcgtgcatttactcatcctcgctatcttcatcgatttgcttagcgtttaaaatatcttttgcaaactcgaaaaagagttcttgtttaacaagtgcgataccttgctggtcatctccgagcataagcagtgaatcccccggatttatatcgaaaacatctcttgcttctttaggaatgacaatctgtccttttgtgcccactttaacagtcccgaaaatgtgttttccttttggtgccgtcatgtttatccctccgaaaaatgaattgtattttttgtatgaattgtaatacttcgtatactaaacatacattgatcttccataaaattcaataaaattcatgaaatagttttattttcataaaaaagcactcctgccatataacaggagtgcttttgattttatcgtttgtgttcctttatcatttccagatgggggatgcccgcatcgagaaattcttcgccggatgtgacgcggtatccttgtttttcgtaaaacggaaccgcctgcgtctgcgcatgtaagataaagctgtcggcgcctttggctgccgccgctttttcaagcgcctgcataatgatggctccgacgcctaaagaacgatggcttttcatcacgcagatgcgctctaattttccatgcccgtctttcaagcgccatctgccggctccgaccggctggccgccgtcatatatgactatatgctctgacgtgtcttcgaattgatcaatctcttcttcttccggaacgtgctgttctttaacaaagacctcttttctgacgaaaaaagcgtcgtttagctgtttttcagtttttgcgatgatggattccaagcagttattctcctccgcctaataaaaatgtttcatacacagtccatgagccgttatccagctgatagagcaagtgaaaacggtcgatgacttcttcgtgggaaatgtccagcattttcagctgtccgagtacgtcggaatgttcatctgacgacagcttctggccgaccgtgacatgcggaacgaagctgtattccggctcgccggataatgctcctgagtagcatttctcactcagagattttaattcctccgtcggctctgctttcatatatatcacattattcacaggagaaaacgagctgtattttgtgattttcagaacgagcggatgcgactctttcgccgtctgtctcagctgtgatacgacctgctcgatttcctgttctgtcgcttcaaacggatctcttagcgtcaggtgcggaggaatgagcgcgtagctcgggtcgtagcgtttccggtacgaatttgcgagatcctgtaatttttttgatggaaataaaacaataccgtatttcatgaaagttccctccttaaatgaatggttacagcatttttttcagcgccggcgtgatgagcggctgccagtaggtccatttatgatccccgtcgaaggtttcatacgtgtattcagactgtttgctttccagcagctgtttgagctcttcgttcggcgcggtgaaatcaagaacctggccgtctgtcgtgtgaacgccggtttctttttctccgatttgatgataaacggaaatctgtttgagatcctccgactgccggacggcatccagcacgtgcccgtcaacatacggagactgcatgatgacgtttccaaacatgttcggatagtcaatcgccgtcataagcgaaacggttccgccgagggaatccccgatcatggtgcggccgtatccgacttgataagtcgggtattctttgtcgataaaaggaacgagctcatttgcgatgaatcgcttatatgaggcgaacttagacccttctggatggtatgtgtttcttcgctcccgcacatttttataagggacgccgataatgatgcagcggtcaatttccccttttgacataagctcttccgcctgccgcccgattctccctaatctgaaataatcatggccgtcctgagcgatgaccgtatgatatttatacaggggggagaaggtggcgggcaggtagaccaaaacggtcatttcctcttcaagctcatgggagaaaagttttttctcatgaatgattccgttttttgatgccacttcgcattcctccaggccgcttcttgtcttgatggttttttcctattgtaccatgaattattagaaatttctttcttcagatgcacttcttgcgagagttcagataaataaaaagttattgaaattcattttatagtgcgttaatatagaacaatcagaaaatacaaaacaatattcttatcacgagaggtggagggactggccctttgaaacctcagcaaccggtttgctttgccgcgggaaggcaaagtgccaaggtgctaaatccagcaagcgattcacatgcttggaagataagaggaagagaaaagctccttcttcttatgaagagggggcttttttatttttgaaaaaggatggtgcttactgatgacgcagcatgttgatacaaaattagcccaaatcggaaatagaagcgaagaagcaacgggaacggtcagtccgccgatttatctgtccaccgcttaccgccatagaggaataggagaatctacaggttttgactacgtgcgcacgaaaaacccgacacgccagctcgttgaagacgctatcgccgtgttggaaaacggtgcgagaggctttgccttcagctcgggaatggcagccattcaaacgattatggctttatttaaaagcggggatgaattgattgtatcctccgatttatacggaggcacgtaccgtttgtttgaaaacgaatggagaaaatacggcttaagctttatttacgatgatttcagcgatgaagactgtttacgctccaaaataacggaaaacacgaaagcggtatttgttgaaacgccgacaaacccgttaatgcaggaggcggacattgaaaaaatcgcccggattacgaaagaagccggcctgcttttgattgtggataatacgttttataccccggtgctccagcgtccgcttgaactgggagctgatatcgtcattcacagcgccacaaaatatttaggcgggcacaatgatctccttgccggtcttgctgtcgtaaaggatgaagagctcggcgagatcatgtttaatcaccaaaatgcgatcggcgccgttctcccgccgtttgattcgtggcttttaatgagagggatgaaaacactcggactcagaatgcgccgtcatgaagaaaacgcccgtgaacttgcagaatttttagaacaggaagaagaaatcgccgacgtgttatatcccggaaaaggcgggatgctgtctttccggctgcaaaaagaggaatgggttaatccgtttttaaaggcgctgaaaacgatctgtttcgcagaaagtctcggcggggtggaaagctttattacataccccgcgacacagacgcacatggatattccagaagacatccgtatcgcaaacggcgtctgcaaccgtctgctgagattttcagtgggcattgaacatgcagaagatttgaagcgggatgtaaagcaggcattacagcaagtaaaagagggggccgtgtcatatgagtaatcacaattggacgctggaaacccagctcgtgcacaatccatttaaaacagacggagccaccggagccgtcagcgtcccgattcagcatgcttccacattccatcagtcttcatttgaagaattcgggacatatgactacagccgctcaggcacaccgacaagaacagcgcttgaagaaacgatcgcaggtcttgaaggcggaacgagaggctttgctttcagctcgggaatggcggcgatttcgacggcatttctgctcttatcccaaggcgaccatgtcctcgtcacggaggatgtgtacggcggaacattccgcatggtgactgaggttctgtcccgtttcgggatcgaacatacctttgtcgatatgacggacacagaagcggtcgcccgcgccatccggccgaatacgaaagccatctatatggaaacaccgtcaaacccgacgctcggcatcacggatattaagggcgtcgtcaaactggcaaaggatcacggctgtctgacataccttgacaatacttttatgacgcctgctctgcagcgtccgcttgatctcggcgtagatatcgtgcttcacagtgcgacgaaatttttaagcggccacagcgacgtgctgtcaggccttgccgccgtaaaagatgaagagctcggcaatcagctgtataagctgcaaaattcatttggagcggtgctcggcgttcaggactgctggctcgtattgagaggcttaaaaacattgcaggtcagactggaaaaagcgagccggacggctgagcggctggctgcctattttgacggacatcccgccatcaaaaacgtttactatcccggccttgccggacacccgggagccgatacccataaacggcaagcgagcggagcgggcgccgtcctgtcctttgaattggaaagcaaagaagccgtcaaaaagctggtcgaaaacgtatcgcttccggtatttgccgtcagcctcggcgccgtcgaatccattctctcataccctgcagccatgtcgcatgccgccatgccgaaagcagagagggagaaacgcggcattacagacggccttctgcgcctgagcgtcggagtcgaaaacgccgaagatttagagcgggacttcgaacaggcattgaaaaaaataacccccgcccaagtgagatcataaacgaaaagggcgccgtcaattttgtgacgcgccctttttttattttagataaaaaaagtgttgacgaatgagaaatcaggatatataattataaatgtcagagagacaacaacatacccagcaacacatacatatcatgattccgtagctcagctgggagagcgctaccttgacagggtagaggtcgctggttcgagcccagtcggaatcatacacggcggttagaggcgttatataaacgtttctagccgttttttattgcgttgacttagtcgatgacttaggcgtattaaggcgcagggtaggggtcctaccaacgacaaggtagcggtttttatttcgatgacttaaccgaatggaggcggtaatatgtccgcaaatagaacaggaaaacgcgtcaaaaaggaacgtactttacggaagactacgagcaatctcgatgtgcttttcgtacagtttcgcggaaatcagaggggcgggcgcaatcaacgctcaaccaatacgaagacaattacaggttctttcgaatttttggatcgtaaggggatcgggcggtccattcacgaaatgagccgagaggtaattcgtaagtatatcgtgtacagtcaagacgagtgggttaaattcgaggaccattattttaagaaggacgagcatatgaagaaaaggcttgcgccggggacgattaatacattagcgttttttttaagacgttagtcgcatttcacgatgtcagaagctgggtgaacgattcgtctagtctatatgtctaagagcattggtggagtaacggaacaggataccgtcgaattgtgggccgtatctctttttagggtcaaaattgttgaaaagttcagctagtgatgccgtcaagtagatccaaaccgcactgtcggtattgcatttctatcggataagaaagccgaaaaattcggtatcaatataaaaaggccctctcataaaatgggggcctttcagtgtttcttttaaatagcctcttttagttgttctattacacttttcaaccattctataggtggtaagccaattgtcgggaaatatatttctgcattacactttataatgtcttccttttcttctttagttagatcgctatttagaaactcttcgcaatactttactgtaaatagcaaactttctttactaatttcctcaataaattcgtctaaggcgtgttcaggggattggatatcttgatgaaatgttgcacctaaaaaattttctaattcatctaagaaatcatacctttcatccatgatacttcctctctttctatttggttggatatcctgtaaggataaagttaccgttattatcttttttgagtataatttttgcgtttgtaacgttttctactagatctgaatttcttgatacacttctgccgattatttctccatcgcccttgtatcttaacattaatttaggttttttaggatcatcaatccaattttcgattttctttatattttttggatcgtttaaaactgaattagcaattctttcagcggtagccctatctttaaaagtagatgaagctgtaatatgtgggttaggatcaattttcagtctttctattaattctttatctgttttcccaacatgtctttctataaggtgtccgccttttgcttcatgagcagctaagccaccgcctggtgcgagaggactgctgtctccttgtttaacactatgtatgccgctattgtcagaagacacagattttctgagcacactctctttctgatcttcaataatacttttcaacaaaggcgtattcttcacattatgagtattttcaatatcctgtgctattccggcaagtgcgggttcgtacttatttttcgaaacggaattgatatagtcttttcctttttcaatccctgtttttacatgttttgcagccgctttttcaccggcttccaagacgttatccactttggcggcacctgttttggcgagcttgcttgatacttttacagctgagccggaaccttttagtccgacgatgcttatttattgattttgtcatcattcatcgaggggcgaattggggacggaactgctttttgggctgattttgaagtacattcgctgtatactgcaagggagataaacatcgcctttaaggcggcggtctttgccgaaacctgttcatttcagagaaatacagaaatttcgtatcactgaacggctaaagtgataacgatcagcagctggttaatccagctgtttttttgtatttgaaaaacggaatatttagttttttatggcaaatacagcggcactccgaaaatcattcacaatacaggaaatgacgcatgcggccgccaatgaaatcagttatatgtcgggtaacagcgaatcgacaagctatcattttgccgtcgatgataaagaagtgattcagggggctcttcatctgaaggcaagaaagcatccttcctcttgtcttccggttttttaaagttgaaaacccattaaaatccgaggggagagcgtaaaacagattcgaacggcgctgtcgcccttcattatagcgaaagaacttcgggattgatggtgcatatggagcgaagacagcgaatgcagtaattcgatttcaattgatgaatggattaaaagctgatggaatttatgcgcttaaaaccaaagtaaaacttgaagtgttgttaaaataagcggagaccctttccttttttacagactctctcccacactgacaagaagaggtttgtgttaaagcaaaatctaagaaattaaacccaaaaagattgcaacgacaagcttctaaagagatgaaaaatatcgggatatcaactaaggcataaaaagcgataaaacaggagcttgaaacaagaaaagaaaaaacaactgaatagaaaataaagagaaaaaataaaggaacaaaaatatttaatcagaaaacaaaaagcaaaagaaaagcataggggcagattgaaaagttgagcggcatcagttttttgcttcggactgatttagagaaaaagaagtataagtcagagcccttctcaagacgaggagggtttttctgcaatttattcaaatacacttacatcagtaaatgcggctgaacgtttcagtacgattcagctcatgtatggtttgaagccagacggcatttacggaccaaaaacgaaagcgaaattgaattaataaaagaagcccttcttataagagggctctttttctctaactatgttgttttaagatgttttttaatttgttcagtgacttgcttaagccattctaatggagttatatcatcttcaggaaagtatataccatccgctgcttcctctataaattcattcttgtcttcttctgaatgatcactatttacaaactcagttagtgctattaaatctctttcttttagtttttgagatgcttcatttaaatattcatcaagtgcatcttccggagactctatatcttggtggaaatgtccaccgagaaatctaaatacaggatcagaaactttaatttcaatcattatatatcacctcgttgggtagcctgttagtataaagctaccatcttcatttttctttaatactattctagcattagtcatatctttaacttcatttgaacctttacgaactcctctacctataacttcggttcctctataaggtaacggtaatggatcattaacatcactttttaaccactcttcaatttcctttttatgtttagttaatgtttcattagcgactctttctgcagttggcctatcagtgaaactagaagaggcccgtatcttcttgtttatctgtagcctctgtaataactcttcatcagtcttaccaacatgtctttctataagatgcccgccttttgcttcatgagcagctaagccaccgcctggtgcgagaggactgctgtctccttgtttaacactatgtatgccgctattgtcagaagacacagattttctgagcacactctctttctgatcttcaataatacttttcaacaaaggcgtattcttcacattgtgagtattttcaatatcctgtgctattccggcaagcgctggttcgtacttgtttttcgaaacggaattgatataattttttcctttttcaatcccggtcttcacatgttttgcagccgctttttcaccggcttccaagacgttatccactttagctgcacctgtttttgcgagcttgcttgatacttttacagctgagccggaacctttgagcccgacgatgctcccgatggcgtaagtgatgtaatgggatcttgaatacgcatctccgttaaccattttatcattccatgaatccgccaggtttgtccatatgatttttgcgtaggagggcgtgttcaatacagccgatatggttttagcgactttttgttcatcagagagatggtaaaaatcccatgcaccgacagccagatctttgacgccggttatggtgtctttcccgacatcataaaggccgacgcctattcctttgacgatatcccaagccgtttctccgacttcttcgagctgttttgcttgttcgagctgcatcacatattccacctgagcaggttcaaggttttcatagccgatcttcttcgcgatttccaaatactcatccggatcggtgacaccatcggccagctttttctttaggtccttaacttcccgctctttcgcctcttccttcttaatcgtcaaataagcatccgaatgtcttgcgatatcgccttttttcttatggatgtcgctttcacggtacgctttggcgttgtagtgaagcggcgtggcgctttttcctttgcctgttgcgttttgaagctgctggaaatctgcttggataaaatgttcatttgcttcggtttctgcgtattctttcgttagatcgtgatcaagcttgccgagcttatgtatcgtttcgcttctttttttgtcagctgaagaaagcttctgatctgtgctttccgttgaaaatagatcaagcgagatgatgtcatcgatctctccgaggatggagcgcatgtcctttttctgctcctccataatcgcctttgatttactgagggcgtgggtgagctcatgctccagaaatgattcctccacatgcgaattgaaaagtccggcgtcttcgaccttgccgggaaggcttgtgagaaatgcgattttcatgtcgatcagatcaagccagctgtctgtgacgccggcgtggtccttgaaaaaagctttgatgttattggcgccccggcctgagaaatcattgtcaccaagatcagccataccttgaaacgcttttttcaggttgaccatctgaccgcgcagttttttatattcacccgcgcgctgcttggcggcggcgaggagggtggttgcttcgaaaactttcatgaccatatcctttcttttaaaaaggttcaacaagatattaccatggaggaatgaagggaaagacaaataagtattttgaaagtgcaaaatgattaatttgttctgggtaaatttacttattttatgatcgggaattggggaagagttagctttaggttgaatcggttgttagaacatcatgtgatgcacctcctttacaaagtatacacacatattagagggctgaaattcacccatatgaattggatacggcggcccaaaggcttttcgcatggaaccaacatgcggcaactggtcaacagctttagaaatttcatcctaacagggaagtgcggcaagcattgggaatataaaggaatataggcttacagctatgaaggatgtatgaaaatccgtcagacggcgaaggaaaggcaatctccatgtaattgtgacggtttgaatgcgggtgtatggaacttcccattcatctgctgttacgtcagagggacgaagcgacttttttgaggaggaagcggaatgattgaatttacacggccatcgcctatgaagaaaacatgcacgatgcacccggaaaaggaatctgtcagatcggtttcgtttactgattttaacggcaattctgtaacagtaaccctttgtcaaatgtgtctggctgaattaaaaatgaaagccgcgactgaatacaggagcatgacagaggagcgggccaaactgaatcgtttcaagattggtgatcatgtgtatttagagcatttgggagtagtcagcgagataaaaaacatggaaggcgctcaagtggcaaacaggacagacgcagacggagtccggaaggctacccctaaggaaatcgcagaatacaaaaaacaggggaagcaatgacggtgaaaaacgattcagtcaatcatttatcagttgttttacttacaggagcggcggccggatgtttacggatgcgcgacttacacggccggagcctccacggtgaagtgaaggaaaattcaaaccaagaatgtgaattgatcaaacgcagtttcatgaatctccgaaggctttcatccgaaatttaggtgcagtatggaaaaaaatttatggaaacttgacataatgctgtcaggtccctattgtatgattaaatgaatggccagtaaaatgataggaggcgttcaatatgaaattgctgcaaattagactattggttaatgactttaagaaaagcgtcgagttttataaagattcattaggacttccaataagttggttagagaaggaaatggaatatgcactcttcgataatggagaaacgaaaatagagcttttatctcgagaaaatatggctgaaatagttggagaagaaagaaaatctttagacggagatgcgcaatcaagttttttgcttcagtttaaggtagaagatgttgataaaacgtatgactatctgcacaagcaagggattaaatgcgtcaatgaaccgcatgatcgtcaggaatggcgtgcacgagttgctcatttcagagatccagataataatcttattgaaatatataaaatgatataattttttgactggcaggattaaggtaatgcgtttgttaacttaccttatgatttttatagtctgcaagagaaacatatataggtccaagacggaaagcctgcggacactgatcattgcacagcatcactgtgctctgactggtgtccgtttttatttgcacggagggataacaaatagatgatgaacacgaagcggaaatgcaaacattcagacggcaagggcggcgcatttaagcgcaaataaggggatgaatcagaatacaggatttaatcattcaaaggaaatatattgactttcatcctgtttgtaatgttaattagaagatgtatacaaaatcattttaatgaggaggtctggatgtgaaaaataaagcgagaatacaatttggaatatgcattggacttttatgtttaagctttaccggtttcaatcctttattcggctcagcgcatgctgaagcgaaatctatagaggacgcaaaaatgacaagctgtataacgaatcagaaatttgttcagcttgagaaaaaatttgatgccaggctcggcgtttatgcgattgatacaggttcaaacaagacaatcgcctatcggccgaatgaacggtttgcttacgcatcaacctataaagttctggctgcagctgctgttctgaagaaaagctcaaatgaaaaacttaatgccatcatccgctacagcaaagacgatttggttacatattctccaatcacagaaaaacacctggatacaggcatgagcctgaaagaaatctcagaagccgctgtccgttacagcgataataccgccgggaacctattgctgcagcagcttggcggccccaaaggttttgaaaaatcactgaaacaaattggggatcatgtaacgaaagctgatcgattcgagacggatctaaactctgcgattcccggggatcgtcgtgacacaagcaccgcaaaagcactggcaactgaccttaagactttcgctttgggtaacactctcacggctgacaagcgcacgattttaacagattggatgcggggcaacgctaccggcgacgaactgattcgggcaggcgctcctgcaggatgggaagtcggcgataaatccggggccggaagctacggcacacgaaacgacattgcgatcgtttggccgcctgacagagccccaattgttttggcaatcctgtcaaaccggtttacggaagatgccaattataataatgctcttatcgctgagactgcaaaagtcgctctaaatgctcttaaataaacattgccgttcattttttatggacgatttttatatgttgagaatgcggtatgccggtttcgtttttcgataaatgttataatgtaaagccataaaaagatgggaagagggggaatttcgatgcattacataacggcatgcttaaaaatcatcagtgataaagaccttaatgaaataatgaaagagttcaaaaaacttgaggaagaaacgaacaaagaagaaggctgtattcagttccatgcttatccgctcgaaccatcagaacgcaaaatcatgctttgggagatttgggaaaacgaagaagctgttaaagtccattttacgaaaaaacatacaaaagatgttcaaaaacaagaattaacggaagtagaatggttaatgaaaagcaatgtgaatgagtaaaaggctttgtctattgttggctgactctgccggcaaccatcatcagtttcattcactaaaacccttgctgtgcaagggttttttactttaaaaagttctttatatcgcagtctttttatgggtaaggaacagacttggaatgaagatggcggcaaggatgatgacggatactaagaatccggcatggtagccttttaaactgttcggaatcgtcggctgcagtccttgtatgacagttgcggtaacggttgcgatcacagctgacccaaagctggaaccgaggttttcaatcatatgaataccgacacctgcttccggaagctgtttgctgtcaagacctgtataagcgtcactcatcaatgggagcataattcctccaaaactggtgccgcggataaataatacgacggaaatccaaatcatacttgtgttatcggtgataaaaataagcgggatagatccgatcagcgaaagaacaagactgaccgtaaccacgtatttcgcaccgatcttatcaatcatttttccgatcagcggacgagtcacgagcattccgactccttgagggattaaagcgagtgctgctccggctgccgtgaactgacgaatgttttgaaaaaacagcggaagtattaacatcggccccatgatggcaacattcgctaagaacaacccgatcgaagatgccaagaagctcttgtttgcaaacaaattcataggcagcacggtttggtttttcttgatctgattatatacaagataaatagctgctgaaacaagaccgatgcctgtccataaaatggtgtcgctattgttaaatgatgcatgatccgccgcttttgtaataccgtaaatcaatgccgcgctcattaatgacaaattgataatcccgaaaatatcgagtttacgatctttgttgaatggttcaaagtctggaatggttttcatcataagcggtgcagcaatcaaaacgatgaacacgttgatgtaaaaaatccaatgccatgaagcgccttggacgatgaagcctccgatgacaggtcctaagatcgggccgaagatcataggggtgctgacgattgccatcacttttcccagattttccggacctgccgttttaaccaagagtgttgacataagcggagtcataatgccggcgctgaatccttgaagcaaacggaagaagatgaagctggaaacgtcacggctcatccccgcaaaaacagaaatgacaccaaaggcgatgactgagccgatgaagattttcttaccgttatatttattcataagccagccggatacgggtactgcaatcgcaagtgctaagacatagcctgtaacggaccactgaatggtatccaatgtcgtgttgaagtctttggtcagtttgccgatggcgatgtttaccatcgtagagtcaagcattggagcgattgctcccagtgcaatagcccaggcggctgtgagaacttcttttggcacccgaagttcctttcttttatgtgttgacatattactctcctctcaaaattgctgtctttgtttcctcgtcaacaaaataatagagtgattttgtttctttgtcaacaataagagggatataaaaaggcagcccgttttcatggagcagggctgcctatggttttattcatatttattccgatttcaagtctgcaccaagtttctttatttctgaatccaaatgcctgctgtatgtttccacgaagttcagcatcgtgtcaaattgttcatcagttacttgttcaaacacgattttgtcccgttcttgaaactctttatgcaattcctcgtgaattttataaatgacttttccttgctcagtaagcctgaaatagatttctttcttgttaagcggcttctgatagctttcgataaggcctttattgataagctttttcgttaatttacttatggcgcctcttgtcatataaagggactccgcaagtttagtcacattggcgtcttcaattttttcgatgaattcgatgcaatgcacttcagaaggtttatgccccttaaggctttcttccatcttcagcctattcagccacaccatcttgttaaaaaagtccctgaaatccgtgaggagctgttcttttttgtccatgtcccgtcctcctgctcggtggtgcttacacaatattataaaatttttgtttctttttcaacaatcgtaaagttattctttaggaactgagagatagtgcgcagaaataagaaggagggggacgagaagaagtattctatttaaaaagcggctttttaaccgaaacgtgggtcttcgagtatttttctttccgtattcgttacttgctctttttcataacaggccaacactacagccttataaaaaagcaggctgcgcaatgagcctgcttgagattcgcatcaatcattttcctgttgcggcatcatgaaaagcgtcgattgcggttgtgtatttcaagacgtttttagacactttggcggttgcgcctaatgggtacgcgtctgacagaacgctggagtgagcttcgggctcccagtaaaatacgccggttcctttgccgttcggaacggctttcaccagttttatggtgtcttttatggtccagtaggaatctttcggattattttcatctccgcccagttcaaccaccatgacttccttgttgtagcgtgaggcgatgtcattcaaattagatgataaatggccggtgagctcccagtacggcttaccttcccaatagggatagaatgaaacgccgatgatgtcggtttttcctccatttttaaagaattgatcaaaccaccatctgaataggctgttgtccgtgccgtgtgccaaatggctgatgaccttggtggccgggctgacggatttcacggcgtcatagcctttgttcagtaagccggtcaatttgctgaaatcgttcgtgctgccgtcgggcagtaaaattcctgaattcatttcattccctacttgcacccaatcaggggagatgccgtgatttttaagttctttcatgacatcgtacgtatggttatacacggctgcctgcagctggctgtttgaataaccgttccattggttcggcttgatctggtggcctggatcagcgaacacatcactgtaatggaagtcaaccattaccttcattcctaatgcttttgcccttttggccgccgcaagtacgcccgctttgtcactatagccgagcatggtccatgttgtgccgtctttcagccaataatagctgcttggcggattcacaaacactctcagtctcacggcatttattccgtgatctttaagaatctgcaaggcatctttctgttttccgccgtcatccagccagcgcacaccttcgtcctccatttgtttcagccatcctatatcagcgccataggcaaacggggcttccgcttttgctttaggagacttctcaaagaatgtaaaagcagtgaaaatgagagaaagacagattgcgtttacaaatacacgtttcaatcggtttttgaacatcacaatacctcctgataaaaaagattgttgattgatttcactctgaatgtttcagctgccattctccaataacgtcgtgaaacgctgaaacgcctgaattccttcgggtgtcattttaaaaacgcctgcatcggtcagcgcgcgtaaaaatacattcgcggtttctttttgtaaaacagcggctgcattttctggtgtcacgtctttatccgctttgatgttttcagcccacggaagatgaatgtctttgatgtcatgaggttcattcagtaaatactttttcacttctgccagctcatctttcaggcggggaggtaaaacggcgagtcccatcacttcaatcagaccgatattttcttttttgatgtgatggacatcttgatgcgggtgaaaaatgccatccggataatcttcggaggtgcggttgtttctgagagcgagatccatttcgaaatccgttcccctgcgtctggcaattggagtgacggtattatggggttcatttgtctttgcgatgatgttgatggtttcgtctgaatattcccgccacttttcaaaaacatacgcagcggcatcggtcagcaaatccggatcttttgcgcgaaggcggatcactgataccggccacttcacggcttcggcctgaacgtctggaaaatgacgcatatgaaaagggtagagggaacccgcttttgccatcggaaactcatgggcgccgccttgataatgatcgtgagaaagaatggagcctcctacgatcggcaagtctgcgtttgatcccgcgaaataatgcgggaagatttccgttatggccagaagccttctgaagctgtcacggctgatgttcatcggcttgtgcacgcttgaaagaaagatggcgtgctcgctgtaatacgcataaggagagtattgaaacccccattgttctcccgctaagtcaagcctgatgatgcggtggtttgaacgggcggggtgatgcggtgttccggcgtacccctcgttttccatacagagcaggcatgtcggataccggttttccggactgttttttaccgcggcgatgtctttagggtctttttccggttttgataaattaatggtgatgtccaattctccaaaaggtgttgatgagcggtacacgatattttttcgaatggcccgcgtcttaatatagtcgttgttttggctcagtctataaaaataatctgttgcttttttcgggcaatctgataacaatttgctgaatgcggcaatgatcagagaaggggccggcgtgatcacgtccatgattctgcttcccagcatgtctctttcagccggcgtatcgtttatgattgaccgttttaccgcgtctttcaccatttcgtccaaatagtgaagcctgttttgtttcttgatatgtttcggttctgcataatccgtcagtccgagcagatcgagaagtctgtttcttgtgtaaatcacatctgtttcatttatgtcgcctaagacagtgctttctttcagaaaccctgccactgattcaaaaacttcaatgaccgccgcctccatttcatttgtccttgtatccgtttggatgttgccgatgccaattccatgctgacgcaatgatttccgatatgtccgtttgtttcggattccagcccagaatgttccgcgctttatcgctggaagcgatgagggtgcttggatcaccgggtcttcttgcggccgctcttacttttatgtctctttcggtcacttgccgggccgcttccgccatttctgatacggaaaacccgctgcttgatcctaaattgaaaatgccgctgtctccgccgttttgcaaatattccagagcgagaatatgggcatcgattaaatcggaaacatggacataatcgcggatgcacgtgccgtcttttgtatcatagtcagtgccgaatatcaaaacctcctcgcgctgaccgagcgcggtttgtaaaaggatagggataaggtgggtttccggatgatgatcttctccgatggaaccgtccgttttcgcgccggcaacgttaaaataccgaagcgagacatattttatgccgcaggcggtttcacaccacttcagcattttttctgccatgagttttgattcgccgtatgcgctttccggcttttccggcatgtcttctgtgatgggcactttttcaggttcgccgtatacagcggcggatgaagaaaacacaatgtgtttcaccccgaattcctgcatgacctccagtgtaatttgcgtaccgtacacattattattgaaatatgaaagagggtctttcattgattcgccgacaagggattgagcggcaaaatggagaacgcctgttacgttctccttcgcaaacacagagcgaagaaacggtttgtcacggatatctccatggtaaaaaactgctttttcatgaacagctttccggtggcctgtctgcagatgatccacagctatcgttttaaatcctttgtttaataattgatcaaccgcatgagaaccgatatagccggctccgccgagaacgagaatcgccatgatttatttttccctccattcagccgcgccatcgcttatatccgcgatgtaaaaagaagcttcaagacctgtcctgctgcggtagtgagatgaaacggcccggataaagccggcggtttcttcactttccacaatggctatggcgcagccgccgaaccccgcgcccgtcatccgcgctccgagtgctccttctttccaggctgcttcagcgagcgcgtctaattcgtcaccggtcacttcataatcatcgcgtaacgaacggtgggacgcattcatcagctcgccgaacgttttcaaatcattcgatttgagagcttccgcggctgagagggtccgctcgttttcattgaccgcgtgccgggctcttttacgcaaagtttcacaggagagaagggattcgagttcgttgaattcttctgccgtcaattccgcaagtgatgcgatattccgatattgccgcagttccgagagagctgcgtcgcattcgctgcggcgttcattatattttgaagcggccagctcccggcgcttgttcgtattcataatgacgattttatatccgttaaaagcagccggaatcatttcgtgctcaagcttatcgcagtttaacagaatggccatgttctttttgcctttttgcactgcgaattgatccataatgcctgaattcacgccgataaattcattttcgactcttttcccgataagcgccagttcagtatctgaaacatccaggctgaataactttcttaaaatggaaccggttaacatttcaatagaagcggaggagcttaaaccggctccgtttggaatcgtaccgtgaaaaagaatatccattccgctgtctatttggccgccggctttaagaaggtaatggatcatccccttcggataattggcccagccgtcttcttttttgtatgctgtggcggaaagatcaaggcagacaatgccgctgtcaggaaagttttctgagtataaccggatctggtgatctccgcgttttgcgcatacggcatatgttccgatcgtgatcgcgcatggaagaacgtggccgcctatataatccgtatgttccccgatcaggttgatccggccgggtgcgaaaaacagttctccgttacttctcttgaaaatgtcttcgaatcttgattttaaaagtttggcatccatgataaacctccgattctattttgaggtatgctccagtatgaactgaatggctttttgtgaatttctggtgaggctgatatattccgctcctttcgttgcgatgagtttcacttgcaggcggtccgcatcttctttaatgtcatcataataagagccgacttgcggagccaaaatgatcatatcgaagtctttcatgatgtcgtaatgggatccgtaggcgcctgctgaggcggtaatcggcacgttatattcttcggctccttctgtcagtgcgttcgcaagcatggcgctcgttcccgctccggcgcacagcactaacacattggtgctgtgttccaaggcggatgaggattcctgaagatttgtgctgatgacggaggacgcgtcttcggaggcgccggccatggcgggctgtaatgtttgcggcgcggtttcaggctcggtgtgttgggcttctttcgccgctaatactttgtcataagctttacagaatggcaggtatatcaggaaatcgacaatgattaatacagccgtcagcacaaaagccgagagccccatgccggttccgagaatcaagccggcgggcgccggggtggcccacggaagaacatacataaaactgttcattccgatgacatccacgaaaaatttaaacagacagacattcaccatcggcgttacaacaaacggaatgaaaaaataaggatttaaaatgatcggcgcagcaaagagcagaggttcgtttactgcgaaagacaccggaaccgcggatgcttttccgactgctttcaattgcttggatttcgcgaaaagaagaaagataaacggaacaacaagggttgcgccggtccctcccattgtgccgacgaagttcccgagtccgacggtcagcacgttggacgcctgctcaccggcattatgaagctgaaggttcgcctccacatttgcgtaaataatagctgcgatggccggttccacaatagaaggaccgtgaacgccgacaaaccagaacagcgccatcattccccaaatgacacaaatccccagataaccgtctgcggcggtaaaaaacggcgataagagagaggagagagcctctgcaaaagatacgttcagcgtattcctgatcaataaatcaacgatcaccatggccagaacggaaaaagcgaacggaaaaacatctttaaatgtttgtgaaatggtacccggtacttctttaggcattttaatcgtaatatttttcagcacgcagaatctgtaaacgttcactgttatgaaagcggatacaaaagcggctaaaagaccttttgtgccgaggtattccgtggagaatccgccatcgatttgagtgacgcttaaaatgagaaacccgacgactgaagcaagcatcgctgaaacggggttgatccctttgtttttcggcatttttcggttcattgattcactcaggcatttcgcacttgttgccgcaacgatcagaccgagggcgcccattgaatagttataaactttccaaagccattcagaaacacttttaggccaagtgaaacccaacacttccggcacagcggcggtgaggatgaaaatgctggcgaataaaataacaggcatggccgttaagaagccgtcgcggatcgcgcctaaataaatgtttcttgagattttttcaaaaaacggttttcccttttcgatttgcttgatgataccgttcatttttccactccttatcggcggcttcggtagagttctataaaatcctgaataagatcacggagcaaaagggttgtcatcaagtggtcctgaccgtgaacgaaaataaaccctaattccatgtccttgccgtcagcttcttcagctaacattttcgtttgcgcattgtgggcgagggttaaattttcatcggcgcttttcaatgctgcttccgtgttttcgaagtttccggcacggacttctttcaggactttcaataaagtgcttctggcgtcgccggcataggcgacgatttcaaaaccgagcatctgcaattcttcctttgtcatgaaaaaaacctcctaaagacggcacacatgatgaaaagagactcttttcaccatgtatgatcgttaaatgattgtttttgtttcacttacaagtttgtaccagtaggccgattctttcggataccgtttttgggtgtcaaagtcgacgtaaaaaagaccgtaacgtttgttgtagccgttggtccatgaaaataaatccattaaggaccataagaagtacccctttacattgactccgtcggtaatcgctttactgacggcttctaaatagacttttaaatagtcgattcttgccttatccataatgatgccgtcttcaaactcatctttatagcccatgccgttttcggtaatgtacattttgttatattgcggatagtcccgtttgatgcgcatcagcatgtcatacatgccttcaggataaatgagccagtcccaatcggtccgcttcaggccttctttgtaaattctttcgccgattccttttactttatagaccgaagtgcccttatcgcccgttccgttatggtgaataacggtttctccgtcgtacgctttgacgaaatggcattgataatgattgatgccgagataatcattgcgcgttgaagcttttttcatcacgtcaaagtcactgtctgaaaactcgtatgaagcgccgtttgcctcacagatttcatccagagcccgcatggtttcctcggagtaatagccgaggtaggtggcgtcgaggagaaatctcactgataacgcgtcatccagaaaacaggcgcggcggtcttcttctgagtcgctggcgggatattttgtttccaatgagtggacgacaccgatttctcccggatagccgccgtctttaaaaagattgacggtcatcgcatgcgctaccatcatatgatggaggcattgaatgacttttgtgatatcacttttaattgatggcgggaaaaccccgagtaaatactggttggtggctgtgggataaatttcgttaaacgtgctccaatatctgatttcgctgaattctttaaagcaaaactccgcatagctgacgaacgcttctattgcagcgcggttgaggaaatctccctggtcaaataatcctttcggtgtatcgaaatgatgcagcgtgacaaaaggggtgacgttgcgtttatggcactctgagaaaatacgatgatagtaatcaacaccttcctgattgattttgcccgtgccgtcagggaaaattctcgtccaggctatagaaaggcggatgccatttattccgaatttttcacatagtttaatatcttccggaaactggcggtaaaaatcacttgccggatcagggctgaatcttccctgtttttcaaggaattcatcccaggccacaggccctttgccgccttcttttgtggcgccttccgcttgatatgccgcagtcgccccgccgaaaataaagtcatgaggtaatttgagcattactgaatcctccttcgccaatgtgggaattgaagtttgttaatgtttgtaattgttatcttttgtttaatagtaaacgcatacatttttgttgtcaatagcttcataaagaaataacatctgtgttcatagggcttttatgagtttcttgttgttttatatgttgattatgttgtttgttagtgtttgtttttgttgaccggagtgccgcgatgtgttagattgtgtgtaaagttgaggggatgattgaacatgttaaaaaaagagcgtcttttaaaaatcatcgacatcgtaaactcgcgggggtttattacggtgagtgatattatcgatgaactggatgtttctgatatgacagtgagaagagatctggacgagctggataaggccggaaaaatcgtacgtattcacggaggcgcacagagcatatcttattccattgatcacgaattatcgcataatgaaaaactgggtgttcaaatggatgagaaggagaaaatcgcggaactcgcagcttcatatgtaaatgacggcgataccgtttttttagggcccggcacgacgattgaacttttagccaaacacctgctgcataagcgaatcaggattatcacaaacaactatcccgtatttgatattttaaagcatggtgacactgcggataccatcctgattggcggcgatttccggaaaaataccggtgccttcgtcgggcccatcgtgaacggcaatctgcagaaattcaattttacgaaagccttcatcagcgccaacggcatacataatgatgagatttcttcttacagcattgaagaaggggaagcccatcaaattgcgctgaataattcgcggacgaaatttttgctggcggataataaaaaattcaaccgggaagatttttacgtgttctataacttgcacgatatggattatctgattacggatgataaagtgatgaaagatgttcaaattcattacgagcaatatgtagatgtcaaaatcgcaaaaaaataaaaaggcgggcggttcgatgaaaggggttatttttgatttcaacggcacgatgtttcaagattcgcatctgcacgaaaatgcatggtttttcatggtgaaaaaatacgcgccgaaaaccatttctgatgaagacattttcgttaacattcacgggagaacaaacagtgaaatcctgacgtattttatttccggcgatttaacaaatgaagaaatcaagaagctgtcttttgaaaaagaagcctactacagagaattatgccttgaaaacaaagatgagttaaagctgacgaagggactgaccggcgtattgaaccatctgaaaaaatcagaaacgccaatgaccattgccacggctacggtaaaggaaaatgtcgagttttactttgacgtctttcagttggatcggtggtttgattttgacaaagtcacgtttgatgacgggagcttccccggaaaaccggcgccggatatttttctcatcgcatcggaaaagttaggcctcaggcctgaagaatgcttagtcattgaagatgccttttcggggctcacagcggcgaaaaaagcaggtgcaggcaagattatggccattgacccgctcggaaaaaaccgcgcgctatttgaagaaaaacagctggcggatgacgggatactgacagatttcacctcgttttttgaggtgattgccggacattctgtttgagagatcagccggttcttcatgccgatatggctgtacaggctgcggactccgttcgcaacacgggatgtttttgtgttcggcggtgtctgcttctcgtgaagaaaggggtttcgctttttaatcggagtcacttttaagacaggggtatccctgtttttttaattcctcgtatttacaaacaagcgctaaggtgcttattgctgactgtttatatgttttacgataaaatcctgagcatacaagaaaaccagccatcctgtaagtccaagccctgatgcggcaatgaaagacagtgaatggcgaagggcgatgccgataatgaccagcataatgactgtggagggaatgccggaagccacgctgaatgcaaagtgacttaatgtctccttcgtttcgccttggatgtacagccaaaccatgctcagcatactgacaattggtaaagccgctatcatacctccataactcgggcttcttcttgatatttcagtgataatcccaataatagcagcggagacaatgattttaacgatcgtaaacatcttcagcacgctccttcatcaaactgaatgcttttaagacaagtgttctttcttcattattcatgctgtcaaaaagaagctgtttaagcttttcttcatcaagaccggaatgccggtaaaggacatccgcccccaaactggtaagttttaaaatgactttccgctcatcctcaacacttctggttttataaacgtactttttctgcagcaaccgctttatatgttccgaagcggtattatgtgatacttgaatcgcttcggcaatgtcttttattccgactgccttctctttttgaatgacttgcagaatccgtacaccttggtgagtaattttttcatggtgctgataacggagacggtagtaaatatctgtccagaggtcatttaatcgcatgatttcgtttgacatcatcatccaccttctatcgtttattaagattatatcttatattacgatatatttttgcggattgaaagcaatttttgagcatgagggagcggcattcgttctgtttttagaagattggaagagacaagcggccgcagcttcaacgaataaacttgtttcatatactctcaataagttatttcctttattttggaaacgccagcttaataccttccgcatataaataagggcgctgacaatatgataaagaaccaaagtatatattcaaatgcagtttttttcagcagggcagtcttgtgctgatagaaaaagatacggggggataaaaagcgggtaagaagataaggaaaggagagagacggatggaacttgattttgtgattcgtctggcggttgcgggtctgcttggggctcttattggattggagagagaattcagggcgaaggaagccggtttgaggacgcattttttagtggccgtcggcagcgccttgatgatgatcgtttccaaatacggcttttttgatttgttatccaacagccatacgtcctttgatccgagccgggtggcggcgcaggtcgtcagcggcgtcggatttttaggagccggcacgattattttgcagcggcatgtcgtgcgggggcttacgacggccgcggggatttgggctacgtcgggcatcgggctgacgatcggggcaggtatgtatgtcatcggcatcagcggcacgattttggcgttaattgggcttgaactgttaaattttctgtttaaaccggcggcgcattctttgtctgtcagtttcaggattgaggagaaagccgtcatgcatgatattttaacttctcttgaggaaaaaggaattcttattacgtcctatgaattgaataaggcggtgcttgaagtgaagggaagggtgaaaagcaaaagcgggaaagcggcggtaatggaaaaagttcaagccctcccgtatatcctgtcggtcaaagttgaatagcagacaggggaagcctcctgtctgcagtcatttcttttcaaacattaataccaaggatagaacgggatatacggccgcggatagtatggatatggtctaggataataataaggcggccgcggatagtatggatatggtctggggaaataataaggcggccgcggataatgatatggcacccgttcgtggctctcggctgtgtattcatgatagaaaggatcgtacaagaggaaaacctccttttcaaatgtttggttccgtttaccttattcctgtatgcccggtatggtgtacgtacaacgcaaaaaaaagacgccggttatcatccggcatctttttttacactttcacatcaattgaatgtccggcagtcgggtgctgggacggcagcattttcactgtttcttccgccgcagcctgtgcttgctgcatgaccgtttttgttaaagcgatatttacattctgcgccagagatgcttggtgcatagcgattgataacgcagggatatccatagctccacctccttatcccttcatatcggcggcatgctctgattatgaaggagactggcggtttctttttacggcccattctaaaaatgcggcagcgcataccccgagggtataggcgaaaatgtcactccagacaaattgccagccgaggatcagcccgccgagcgtgctgcttctgattgcgtcaatccaaggcgcgtgatacagctggctgcattcaatcagacagcaaaacgagaggctcaaaaatgcggctgtttccgtccggatgtgccgaaacaaaagcccgaatcctgtgaaaatcattgccgcccacaaggcatctcctaaataagcttttatgatgccgggcaatagggcggtgatgtatgcggttctggacagcaaaccgagggcgatgataaaaacagtacatattccgtatgtcaatggatgtctattcacttcacactgttcccctttttttgtactcccatgtattgtaaggaacgacggagaagctgtctatgaaaaaacggcccgggaggccgctttttttgcgttatctggcttttaggttgacatggtctgctttttggtcactgccgatgacgaagcggagctcatactgccccgtatggtagacgtaatctgtttcgcccgtttttggcactgtcaggattttgtcagcgctgccgatttgtttgcttaagacgtcaggtgtgacgcttccgaggtttaagcgccgctcgacccctgttccgaaatagcgtatttccgagatttttccgtttttatgataggaaaatccataaccggggtttcccatgttccagctgtataaatcaaatggattgcggctgtctgctttttgttccggctcgccgattttatcgtaaacgtcctgtcttgtgctttggttgattttcaggcctttcacattttgcggcatttcccctttaaacgccgattggtaaaggctgttcaccagttcttgtgcacgttggttttccgtttttgaagcggctgcggcatggacgggctgtgtaaccgaaaatgcttctgcgccgaatgcgcatcccgtgagcatcactgccgataatcccgtggcgagtgtttttttcttcaacatatgtgaacgcctcctttttaccgctcatacccgtatgtttcctgagataaacgagatgttttagtgaaaggccggctgggaatcatagaggatgtatagaggggtacagaaaggggaaaagaaaatggctgatacaaagaaggttacaatcaatggggttgaaatggaagcgccggacggtcaaaccgttttgcagcttttgaacaatagttcaattgacgtgccgcatgtgtgttatcacccgagtctcgggccgattgaaacgtgcgatacctgtatcgtcaatgttaacggggaactggtgcgttcgtgttccgcgcaaataaaggacggagatgtcatcgatacgctttcgtccgatgtgaaaaaagcgcagattatcggcatggacaacattttgcacaaccatgaattgtactgcacggtctgtgattacaacaatgggagctgcgaagtacataataccgtaaaggaaatgaaaatcaatcatcaaagcattccgttcgatcaaaaaccgtatcctaaagatgaatcaaatccgttttaccgatatgatcccgaccagtgcattttgtgcggacgctgcgtcgaagcctgtcaggacgtacaggtaaccgaaaccttaagcattgattgggagcggaaacgcccgcgggtcatttgggatcaggatgtgccgatcaatgaatcatcatgtgtttcctgcggacattgttcgacggtatgtccgtgcaatgccatgatggaaaaaggcatggaaggcgaagcggggtatttaacaggcattaaccaagagacgcttcgtccgatgattgacatcacaaaaggcgtcgaaaccggatacggatcgattttggccatatcggacatggaatcggccatgcgggatgaaagaatcaagaaaacgaaaaccgtatgcacttactgcggtgtcggctgcagttttgatatatggacgaaaggaagagacattttaaaggtcgagcctcaggccgaggccccggcaaatggcatttcgacgtgtgtgaaagggaaattcggctgggatttcgtcaatagtgaaaagcgccttaccaaaccgcttatccgggaaggagactcgtttcgggaggcggaatgggatgaagcgatgcagctgatcgctgataaatttaccgatataaaagaacatttcggcccggacgcacttgcctttatcacatcttccaaatgcacgaatgaagaatcatacgtgatgcagaagcttgcaagagccgtcatcggcacaaataatgtcgacaactgctcacgctactgccagtctcccgccacggccggattgttcagaacggtcggatacggcggtgattcagggtcgattacagatatagaaaaagctgagctcgtgctgataatcggttcaaatacgtctgagtctcaccccgtcctgtccacacgcattaaacgttctcataaactgcacggacagaagctcgtcgtcgctgacttgcgaaaacatgaaatggccgagcgctccgatgtgtttttccagccgcgtgccggatcagatattgtctggctgaatgccgtatcgaaatatctgcttgatcacgatttggcggatgctgcatttctgaaggagagagtgaacggattagatgaattcgtgaaaagccttgaaccttatacaatggaatatgcggaaaaacataccggtgtggacaaggataccctaatcaaagtggcccggatgattcatgaagccggcagcgtgtgcgcactgtgggcgatgggtgtcacccagcatatcggaggaagtgatacgagcacggccatttccaacatgcttcttgtgaccggaaattacggcaagcccggcgcaggctcatatccgcttcggggccataataacgtgcagggagccagtgatttcggcagtatgcctgacagcttccccggctatgaaaaagtaacggatgaaaaagcccgcaaaaagtatgagcagggctggggaacagacctgccgaaagaaatcggaatgacaaatcatgaaatgatcgaaggcatccactcaggaaaactgaagtccatgtacttaaaaggagaagaaatggggcttgtcgactccaatattaaccatgttcatgccgcatttgaaaagcttgatttcttcgttgtgcaggatatctttctttcgcgtacggccgagttcgccgatgtcgtgcttccggcaagcccgagccttgaaaaagaagggacgtttacgaatacggaacggagggtgcagcgcctttacgaagtgtttgaaccgctgggcgattcaaagcctgattggcagatcattacggacatcgccaaccgtctgggcgctgattggcactatgaacatccggcagacattatggaagaagcggcaatgctttcgccgctctacgcaggcgtcacttacgaacgtctcgaaggctacaattcactgcaatggccggttgcagcggacggaaccgattcaccgcttttatttacggataagttcccgttctcagacggcaaagcgattctatatcccgttcagtggaccgagccgaaagaatttgatgaagaatatgatatccatgtgaataacgggaggctgctcgagcattttcacgaagggaatctgacttaccgatcaaaaggaatatccgaaaaaacaccgagtgtgttccttgaggtctcgcccgaactcgccgaagaaagagggctggaagacggaacgcttgtccgtctgacttcaccgtacggaaatgtgaaagtcaaatgcgtcatcacagacagggtaaaaggcaaacaagtctatctcccgatgaacgattcaaaagacgccgccattaaccttttgacaagcagctatgcggataaggataccgatacaccggcttataaagaaacatcagcgaagatggagattttgaaaaaagaaggcgttaatccgcttccgaaaatcaatttccgttacggaaacccgcagccgcagatcggtgtccgggttgatcggaaatgggcgcgtaaagattatgtatttccgggagacgccgtaaaaagggggaagcagcaaaatggctaaagcaatcagcggcatccgaaaacagaccgtcacagaagaagacaaacgaaaaaaggacttagaagagatcgagacggctcttttacgaaataaagacgcgattttggaatctctgcacattcttcagcacatgaacgagcgcggcgttttggcgcttctgcgcgggctcttcggccagggagacaaagtgatggatatcctcgtgaagaaggcgaatactccggaaacggccaatatgctgaaaaatctcctgctgttaagcggcgttctcggcatgctcgatgtaaaacagcttgagccgtttatcgttaaaatcaatgcgggggtcacaaaggccgtcgaggaaaaagacagcggcaggaagaccgggtattttgatatcgtccgcgctttaaaagacccggaaatcaacaaggccgtcactctgctgttttctttcctgaaaggcatgggcgctgatacggacgatatggaaagaaatacgcagcctcctgaagaccaaaagcagcaccagaaaccgcagacgaatgagtgaacatatctcccgagcctggccgaaggctcgggttttttgcgtgcttctcctgttttcttgggagaaatttcacctccggattcatgacttttgttgtgttatgttaatagttaaggttatgaatagaaaaaaattgaaaatatgtgctaggataaaattcaaggtacgtcaactattcaaatatgaaacaatcaggagtgatgaaacatgagtaagctgaggagcacgagacaagccatccaaagaaccctgatgaaaggaaaaaacggcctggacgtatacaacccttttccttggtatgaaaaaatgagacgggaaagccctatacactttgatgaagaaacgaaggtttggagtgtgtttttatacgatgatgtcaaaaaagtcatcagtgataaagagacgttctcaagcctcatgactgatgtgaaaagctcgattgcaaagtccatgctgaatatggacccgccgaagcatacccaaatcagatccgccgtcaatcgcgctttcactccccgcgtcttgaaggaatgggagccgagaattaaagacattaccgatcatctcctgaaacaggcaaagaacaaagggcggattgatatcgttaaagatctctcttaccctttgccggtcatggtgatttcagaattattaggcgttccgtccgaacgtatggatcagtttaaaaaatggtcggacattctcgtcagcatgccgaaagatgcgagtcctgaagcggcggagaaaaatcagcaggaacgtgaccaatgtgaggcggagctggcggcgttttttgcggaaataatagaaagcaaacgaaaacagcccggccaagacattatttctattttgataaaagaggaagaagagggagagaagctcacggcagaagatctgatcccgttttgcaacctgcttttagtggcgggaaatgaaacaacgactaatctcatttcaaatgcgttttacagcatattagagacgcccggcctttatgaagagctgagacaggacccttctctcatcgcgcaaacggtggaagagacgctgcgttttcgcgctcccgctccgtttgtcagaaggacggtccggcacgacactgaactgcgcggacgccgcttgaaaagcggggagatcgttctctgctacgttgcatctgccaaccgtgatgaaaacaaatttgagaaggcgggcgtatttgatattcatcgccaatcgaatccgcacctttccttcggattcggcgtacacttctgcttaggcgctccgcttgccagacttgaagcggaagtggcgctgaaaggaattgtaaaagccttttcacaccttgagccggtccagattgagccgatccgaaacagtgtcatgtacgggctggagtctttagaagcggagataaacgaaaatgagggagaagaaaaatgatgagaaaaacacacatcgccattattaatgtggccgctcacggtcatgtcaatcccacgctgcctgtagccgaggaacttgtcaatcgcgagtataaagtgacattcgctacgactgaggaattcgaagcttccgttgccaaaacgggcgccattcccgttttataccgcacaagcataaaggcggacccggagacgataaaagaacgggtaaataaaaatgatgcgtttgtgatgtttctggaagaagcggttgaagtgcttccgcagctggaagagctgtacaaagacgaccttcctgacatcgtcctgtttgattttttagctcttgccggaaaattgtttgcggataatagcggcatcccggccgtaaagttctgcccgagctatgcaatgaatgagtattttcaattaggaagagacgaagaaacactggaagcggccaaacaggcgatagaagaataccaggagcagattgaaaatgaacaattgaaacggatgacaatggaagaattttttatgcctgaaaaactgaatattgtctttatgccaagggcctttcagccgaaacaggaaacctttgatgaacgattctgttttgtgggtccgtctcttggagaacgcacaaatacgggaagtctggaaattgatgcagccgatgaccgtccgcttatgctcatctcactgggaacggcgtttaacgcctggcctgaattttaccagatgtgtattgacgcgtttcgggactcggactggcgggttattatgtcagtcggcacaacaattgatccggaaagtttttcggatgtccccgatcactttatcatccgccagcacgttcctcagcttgatgtgctggagaaagcaaagctgttcgtatctcacggcgggatgaacagtacaatggaagcgatgaatgcgggtgtcccgctcgttgtcgttccgcaaatgcacgaacaagaggtcaccgcaaagcgtgtggatgaattggggcttggcgtgcatctgccgccgaaagaagtcactgtggcccgtttgcaaaaagacgttcagaacgtatacggcgataaaaacatcctcagccgcgtgaaaagcatgcagcagaaaatagaagaaaccggcggtccaaaacaggctgtttgcgccattgaagaatttttgaaaaaggcggccgtcgaaaattgattgagaaacaggcagcgcaccggaagacggctgcctgttttgttatatgtttttcttcatgccgcatctccggcattccctcaaaaattttccgcccttcactgagcttttaaacagcgtgtagtcgcaattgtcacatcggccgctgtgaacatcaggatattcattgaactcataaatgaccgaagtatcgtatccttttgtctcgaactctttttttgtttccatgattgaaaatccctccgcgaatcaaatcgttctgcccggttaatgatacagcaactgcacgggggattcaacgggagcatagcttgattttcccggctgattgcgtaacaataatagaaataaatgacggcctgccatagggcgcccggcatctgaagggaagaagaaaacagcgatgggaaaaggattgaacgggaaacggattgccatcggcggttcgcggaaaacagaagagatcacaagattaatagaaaagcagggcggaacggcggtcgtccgttccctccaaggaaccgtatacctggcggaggatcaaatggaacccgacgtaagaacatttgccgggcaaaaagccgactgggtgatattcaccacaggcatcggtacggaaacgttattgtcggtatcggaaaaaatcggtctgaaagaagaatttttagcggccgttcatgaagcgaaaatcggctgcagaggctataaaacatatgcggccttaaaaaaactcggcatcacgccgcatgcctcagatgaagacggtacaacaagagggctgatccgctccttggaacgatttgactttaaagataaaaaagtcatgatacagcttcatggcgaaaaagcgccggtcttaacggagttccttgagaaaaacggagcggaggtattccctgttctgccgtatcagcatattccgcctgaaagggagacggtcgataaactgctggaagagctgttaaacggagaggtcgatgccgtatgttttacaacagccattcaagtgcgctctctctttgattatgcaaaagaaaaagggttcacaaaagaattgcagcaggcattcgaaaaacaagtgcttgccgccgcagtcggcaaagtgacggctgaagcgatccgggatgaaggggtaaagagggtccttgctccggacattgagcggatgggagcgatgattattgaattatcccgttactatgaatctctgaccttgtcataaaccatcattcagcagggaaaaaagcctacgcttccctgctgaatttttttaattgccagtgttccgtgaaaagggaaggatatgtcaaggcgctgagtatgatacatgtaagaagagcggaggccatcgttgtaaaaacgatcagcagctgaaagcgcaccgcctgtatcggatcagcccccgctaaaatctgccccgtcatcatgccgggaagctgaacgagacccaatgttttctggctttcaagcgtcgggatcatactgagcttcatactggacgtcaatatctgccggacggcctgcttaggcgttcctccgagagagagaatcagctggatttcttctttccgcaggtctgcttccgaactgagcctgcttaaaaacaggcttgagagcaccatggagtttccgatgaccatgccgcttatcggaatgacatatcttgaagtgaacggaatgatgtgaagggtcagtaaaagtccctgcgtcacggtttccgcgatcgccagtgtcagaaaaacgcgccaaaatgagccgatccgcatttttttccgtttggagacattgtgcgaagcggccgtgagcatgagaagcaccattaatatgataaatatcgggtgatcaccgcgaaaaatcagcgacagcacatagccgatgatgagaagctgaatgacggccctgacggttgcgacgatcatatccttttcgacgccggctttaaaagatttagacaggaataaagcaataatgacaaatatacttgtcaataatagagaaagatcattcatatcagcacccgctcccttgtaaaagcgcccgggccttttcgtgtttcggttccttaaagaacgttttcgtttccgcggtctctaaaagccgaccctcagccataaaccataccgtatcggataatcgttccgcttgttcaaggttatgggtgatccacaggaccgtcagctgtttttgccgatggagtttcgtaatcagtttctcaatgatgagaacagatgacgggtccagcgccgaggtgatttcatccagcagcaggatggacggcagtccggcgagagttcgcgctaatgagagcttctgccgctgccctccggataattcttttgcatttcgatccagaagcccgcgcggaaggtctgtaaaatctgcgagctcttcaggcgtatagtgctgtgctccgtggagtttttctgcgagcagaaggttgtcccgcaccgttccctcgagggcgggagctgattgaaatgcaaggcccgcggtttttctgagctctctgatgtcccagtgtcttatttcttttccgaatacaagcacttccccttcatcaggtgtattcatcagattgcacagcgacagcaatgtgctttttcccgcgccggaagggcctatcaacgccgtgatagaacctttttgaatatgtccggttacacggcttaggacatcaaaggacgtattgttttgttcaaagcgtttgccggctgacagaaaagatattgccggaatttcttctttcatacaggaggacacctttcgtaaaaaaatcaggaaccggtgagattggctgacgtttgctcagccgttttctggtctgtctgccgggaagcgaatgtatgcatgaccattcccgcaataataatgaacagtccggcaaatgaaagaagtgacggaaacgccgcggataaaaagacgatttcgccgatcagtgcaaaaagaacctctccggactgcgtcgcttcaacagcagcgagcttctgcggctcattcctcaccatatcggtggcgcggaaaaataatactgttgcgataacgccagagctgagtgcgacgataaaagattggactgtctgtcccattgacggaagcccgtctctatgccagccgaaagcggcgatcaaaagccaaaacggaaggcttgcgagcgtcatgccgagcacccgctgaaacgtatcgagttttccgccgtattgttccagcattttgcggttgccgagcggataggcaaaagcggcgatgacgaccggcaccacgctgaatagtatcgtgcggccggacagagaacccgcatgctgaagctgaatcagaccggctccgatcaggatgatgacggaagtaaccagcgaaatcagcgggatcttttgtctggcggaaaccgggcccgccggtgaattttttgtttcgtagaaaaacggcgacagaagcacacccgcgacaattgtaatctgccacgtgccggcgatcagccagcccggcccatatgccgccgcaaacgtaagcggggcataaaaaagcacgaacccggtaaaactccacttcagccaaaaaaacggttttttccggatttcatgccagagcggtgtccattttcctttcgcataaacgatcaaaaataaaaacggaaccataaaaagaaaacgcagggaagagctccacatccagcttccgccggaaagctccatcgccctgtttaaaataaaggtgactgcaaaaaacagagatgccaatattccgatcacgatggctttcattaaatccctcattttgacacatatttttttatactatactattcaccggcaggcttcgcaatggaatatgagaaaatagcgttttaacaaatgatgaatgggaaacagacatatacggaggtgaaaacaatgcagaaagagaatattcaagtgctttattttgaagatgacggccgcattccgaataacccgaatcttccgcttgttatttataaagcggtatttaataaagaaacggtacagaaagcagagtccgtcctcagccggcacgattggtcgaacagctggacgggcggagtatttccgtatcaccattttcacagcaccacgcacgaagttcttgtcgcggtaaaaggaaacgcggttttgaggttcggcggggaacaaggagcggacgccgttcttcaaatgggagacgcagcggtcattccggccggcaccggacataaaaaactgtcgggcagttctgattttaccgtgatcggggcttatccgggcggccggcagtacgatacaaaaacggagaaaaatgatagaacttcagaagaaatcagccgtgtcccgctcccggaatgcgacccctttacgggaaaaacgggcccgctattaaaattgtgggaaaaatgacaggggaaaagcggatggtctgtaaaaaaatagcctaaaagaaacgttattacacccccgccatataaataatttcataaacgaaacaattcacgttcaaattttgttcaaaaagtgttattatataagagtaaatcaaattggggttttttatgtttgctattttcagagaggaaaaagaaattttgacttattcaattgtttttgttgatataaaaataatactggatatggcaaagtgaaaaactgggtagtaaacatttatttttgtaaatgattgtgcatgaattcacaatcttgctttttcatgcttttctgcatgaagggggaaaggctaccctttccaaaaaaatcagcatactgcttatagtaaaggagaatcggatatgccagaaacaatcgatcaaacaaatgcatctgtcagccaaggccaacgcgatcttattgatcagctgctaaaacctgaagttcaagaatcactgactgttttagtggatcagcttccaaaactgactgagttagtaaatattttaacgaagtcttatgattttgcacagtctgtagcgacagacgaagtattgaagagcgatacagtgggtgcgcttacagaaattcttgagccggtgaaagaaacagcgaaagaagtggcggctactgcgatcgaagcaaaagaccgcgcggatgcaagcaatgaaacgatcggacttttcggcctgctgcgcatgctgaaagatcctcaagctcaaaagctgttccgttttgctaacagctatcttgaaatcatgaacgaaaaacaaaaataatctcagattcaaattgatataaaggacggaggatatacgatgtcaaaacatattgtcattttaggcgctggttacggcggagttctttctgctttaaccgttcgcaaacattacagtaaagatgaagcacgcgtaaccgttgtgaacaaatacccgactcaccaaatcattacggaactgcaccgccttgcagccggcaacgtgtctgaacaggctgttgctatgccgcttgaaaaacttctgaaaggaaaagacgtcgacattaaaatcgcagaagtcaattctttctcagttgataagaaagaagttgccctttctgacggttctaagctgacttatgacgcgcttgttgtcggacttggttctgttacggcttatttcggcattcctggactcgaagaaaacagcatggtgctgaaatctgcggctgatgccaacaaagtatacaaacacgtggaagaccgtgtgcgtgaatacgctaaaacgaaaaacgaagctgatgcaacgatccttatcggcggcggcggcttaacaggcgttgagcttgtcggtgagcttgctgacatcatgccgaaccttacgaaaaaatacggcgtagatccgaaagcaatcaaactgaaattagtagaagcaggtccgaaaattcttcctgttcttcctgatgatcttatcgaacgcgcgacaaaaagtcttgaaaaacgcggcgttgagttcttaacaggtcttcctgttacaaatgttgaaggaaacgttattgatctgaaagacggttcaaaagtcgttgccaacacatttgtatggacaggcggcgtacaaggcaacccgttagtcggcgaatccggccttgaagtgaaccgcggccgtgcgacggttaacgatttcttacaatctacttctcatgaagatgtattcgttgtcggagacagcgctgtatactttgcgccggacggccgtccgtacccgccgacagcgcaaatcgcttggcagatgggtgaacttgtgggttacaacctgttcgcttacttagaaggaaaaacgcttgaaacattcaagcctgtaaactctggtacgcttgcaagcctcggacgtaaagacgcggttgccatcatcggagcgaactctactccgctgaaaggtcttccggcatctttaatgaaagaagcaagtaacgtacgttatttaacacatatcaaaggattattcagcctcgcttactaattaatccttaagatcacacagaagacattgccggactttctcggcagtgtcttttttttaacggatacaattttctgaaaaataaaataaaaatgattgatatgtgagaaagaggaagctaaaataaaaaagaaccattttgttaacgttaacatttttttaagagggaggatgaaagtgtgaaagcttttatgggtgatgattttttactggatagtacaacggccgtaaagctgtacagggaatacgccgaaaacatgccgatcattgattatcactgtcacttaagcccaaaggaaatctatgaaaataaaaccttcgcaacgattacggaggcatggctttacggtgaccactacaagtggcggatcatgagggccaacggcattgaagagcgctgcattaccggaaacgcttcagatgaagagaagtttttcgcctgggcaaaaacggtgccgatggcgataggcaatccgctgtacagctggacgcatttagagctgcagcgctggttcggcatttatgacgtattgaatgaaaaaacggccgcggcaatttggaaaaaaacgaatgagctcctgcagggagacgggtttggcgcaagggatctcattctgaaatcaaatgtcaaagtcatttgcacaaccgacgatcctgccgatgcgctgacataccacgaactgttgaaagaaagtgattttccggttcaagtgctgcccggatttcggcctgacaaaggactggacatcagcagcccgggttttgccgattgggtccgttcgctggagagcgcttccggaatggctgtcaccacctaccaatcgtatttagatgcgttagaatcccgcgtccgcttttttcacaatgccgggggaagagtgtcggatcatgcgttagatcaaatggtttatgccgagacgaccgaagaggaagcggcccggatttttgcagccggattaagcggagagcatgtgtcttttgaagatgaaaagaaattcaaaacacggacactgcaatatctttgcggtctttacgccgaactggactgggcgatgcagttccatattaacgcgttaagaaataccaatacaaataagttcagcagcctcggttctgatacgggatatgactcaattaatgatgaacgtatcgcaaaaccgcttgcccggctgttagattccgccgaaaaaaagcggcaattgcctaaaacgattttgtattctttgaatccgaatgacaattatattatcgccagcatgatcaacagctttcaggatgggaaaacaccggggaaaattcaattcggcacagcctggtggttcaatgacacgaaagatggaatgctccagcaaatgaaagcgttatcaaacacaggcctgttcagccgttttatcgggatgctgacggattcaagaagtttcctgtcctatccccgccatgaatacttcaggcggcttgtctgcacgctgatcggcggctgggcggaacaaggcgaagcgccttacgatatggagcttttaggaaagattgtcgaggggatttgttaccggaatgctgaggaatatttccgcttttaaaaaatggaatgaaagaggtggcctatgagtaatgtgcctgtcgtgacagcacctgccgcaaaagtgaaggagcataagctgagtctgaaagaaaaagtatcctatggttttggagattttgggaacggatttatgtttgatctcgggcagatctatttgctgaagtttttcacagatgtcgcaggcattccggcagcgttcgccggcagtatttttttggtcagcaagctgtttgcggctttgactgatccgattgtcggctcggccattgactacagaaaaaagatcggaccccgggggaaattcaggccgtacttattattcggaagtattattcttgcggtcatgaccgtattgatttttgtgtcaccggacgtgagcgtcacctggaagcttgtgtacgcctatgcttcttacatgctgtgggggggcgcttattctttcgtcaatattccgtacggctctctcggcgcggccattacacaggatgcggacgacagaacggcgctttccgcattccgccagataggctccctcggcgcgctgctcattacaagtgtcatcgtcatcccgattcttgttcattttgataacgttcacatcggctacccggcagtcatgggaatgatggccgtaatcggaatcgcgggatttatgatctgctaccgaaactgcaaagaaagaattatcgtccgtgaagcgccgaaagaaaagctgtccgtcatgtcggttttcaaatgctttatcggcaacaaaccgcttctgaccgtcgttttcatgacgattttctcaatatcggcatataacattaaatccgctatgcttgtttacttcgcccagtacaatctcaacaatgcggagctgatgtcctacatgagttttatcatcatcggttcttcatttttaggtgttttgtttatgccgaaactcgtcaaacgtttcggaaaaaagcaaacggtgatgatcggttttgccgtcagcgccgcggctgatgcgctgaatttctgtctgccgtcaaatgtatatatctttacggcgttagcgagcattgcttttatcgggatcagcataccaaacggcattacgtgggcgcttgtgtcggacattattgattacggggaatggaagacgggtgaacggaaggaggcgacgacatattcgcttttcaacttctccagaaaactcgcccaatctttatcaggttttctttcaggcatcgggctgagcgttatcggctatatcccgaatgcatctcagacaaaaggcacgctgatcgggattaaagggcttctgctgctgtacccggctttcgctttagcgtgcgccatgctgattatcggtttgatgtataagctgacggaccggcagcatgccgagctcgttcaggacttacatcatgcaaaaccttaactttagtgattttatggactgtccgttaatggtacaatagaaataaatgacagcatacagaaagaaaggaaaaacgatggtaaccataaaagatatcgcaaaactcgccaacgtatcccacacaaccgtatcccgggcacttaacggcagcccctacattaaagagcatacaaaacagaaaatattagagctcgcttcacagctgaattacacaccgaatgtaaatgcaaaaagccttgccatgcaaaagtcccatacgatcgggctgttttttacaagcatcacaaacggaacctcacacagctttttttccgataccatcaaaggtgtaaaccgcacaatcagtgaggaatacaatttgttcgtccgcgcgattgacgacctgaaaagctttgaaaccattacgcccatgagatatgacggaatcattttaatgagccaaagcgacagtgataattcatttatttatcatatccgcgagaaaaacatcccgcttgtcgtgctgaaccgggacattgatgaccggagcatcacgaatatcctgtcaaacgataaagaaggctccagacaggcggtcgactgcctgatcgcaaacggacacagagatatcgcgatcattgagggaaaggaaggattcaggtcaacttctcagcggaaagaaggctatttgacatctttaattgatcattctattccgattaagcatgaatacagtgtaaaaggccgctatgatatggaaagcggcagtcaggcgatggaaaaactcttggcgcttcaatcaccgcctacggctgttttttgttcaaacgatgatatggcgatcggggcgatgaatgccattttcgccaaaggcctgaacgttccggaagatatatctgttatcgggtttgatgacatcggcatttcccaatacatgacgccgaggctttcgacagtaaaacgcccggttgaaaacatcagcatactcggcgcagagaagattttggcgctaatcgccgacccggatacggcggcggaaaaaatatatgaaaacaccgaggtgatgataagagattccattaaaaaactcacataacggcccgtctgaatatccgggttttcacacggagaaatgttaacgtgtgcataaatacagaaggaggcggacagcttgcagcagctgaataaaaagatgtgcggcgaatacattcaatatcctgaaaaagtccttcagttcggtgaaggcaactttttgcgggctttcgctgactggcagatcgatcaattgaatcaattgacggattttaacggaagcgttgtcgccgtacagccgagaggctctgagaaaataaaacgtttaaacgagcaggacggtttatttacgctttttttgcaggggataaaggacggaaaaccggctgaagaacacatgatcgtcaaatccatcagccgcggcattgatcttttttctgactatgattcctttaaacggctggcagcacaagaggagcttcgttttatcatttccaatacgacagaagcgggaattacgtttgagaaaggcgaccggcttgaggatagacctcaaaaaacattccccgggaaattagcggcgttcctttatttccgctataaggcatttgcgggtgacgccgagaaagggtgtattgtgcttccatgtgaactggtcgaagaaaacggacggaaactgaaggcggccgtgcttcaatatgccgggctgtgggagctggaacctggttttactcaatggattcatgacgcgaacatcttctgcaataccctcgtggatcggattgttcccggatttcctgttgataccgcggaagaacttaccgattttctcggatacgaagaccgtctgcttgtggttggtgagcattattatttgtgggtgatagaagggccggaacagcttcagaatgagcttccttttgctgaggccgggctgaacgcactgatcacgtctgaccttacgtcttacaggacaaaaaaggtgagaatcttaaacggcgctcacacggcattggcgccagtggctttactatacggactgcaaaccgtccgggaagcggctgagcacgaggtgacgggcagattcattgaagagctgatcaatgaagaaatcctccctgtgctgcaaatggaggatgtcacccaatacgcggcagatgtgttacagcggtttaaaaacccttatatccaccattatctgcaaagcattacccttaacgccgccgcgaaattcaaaacaagaaacctgccgacgctgaaggcttatatcgaacaggagggccggctacctgagaagctggtattttcgttcagcgccatgatctattcatactggaacggaccgaacaaaccggctgactgcgaggaggttcttaaccgttttcaaatggcgcggtcccattgcaaagatgatatgtttcaagcggcgtctgccatattaggagaagaccggttgtggggaaagaatctgaaccatcttccggggctgactgaacgaacggctttttttctgtctgtcattcatgagcggggtatgaagcaggcgatacatgaatgctgcggcaaaaagggggaagtgaaatgaaagaggtcataaaaatccataaaaacgataacgtgcttctcgccatgcgccattttaacaaaggggagcggctgcatacagacggactgacgattgaagtgaaggaccctgtaaagcgggggcataaaatcgcgctgcaaaccattgaagaaaacggcagcatcattaaatacggtttttcaatcgggcgtgcgacaaggcggatttcggccggcgagcatattcatacccataatctgcaaacgaatttatccgatgtgcaggaatacacgtattcaccgcgcttcgaggacaatccttttacaaatgagaaccggacatttaaaggctacagaagagaaaacggtacatccggcgtccggaatgaactgtggatcgtgcctacagtcggctgcgtaaacggcgtcgctgagaaaatcctgcagcgcttcgtaaaagaggcgaaagacattgcgccctttgacaatgtgctggtattaaagcaccaatacggctgctcccagcttggcgatgatcatgagaatacgaaacaaatgctgatgaacgccatccgtcatccgaatgcgggcggtgtgctggttttagggctcggctgtgaaaataatgagctggcggcgattaaggaaacactttctgaagtgaatggagatcgggtgaaatttctcgaatcacaagctgtcacagatgaaattgaagcgggtactgcgcttcttaaagagatacaccttgcggcaaagggagataaacgtgaggacattccgctgtcagaattgagcatcggattgaaatgcggcgggtcggacggtttttccggcatcaccgcaaaccctttattagggagattttcagattacttgattgcacagggagggagcacggtcttaacggaggtgcctgagatgttcggcgctgagacgattctcatgcagcgtgcggcgagtgaagaagtgtttcataaaacagtccgattgatcaatgatttcaagcaatattttatgaagcacgagcagccgatttatgaaaacccgtcaccagggaataaggaaggcggcatttcaacgctcgaagacaagtcgctcggctgcacccaaaaagccggtcttgcaccggtttctgatgtgctgacatacggtgaaacactgaaaacaaagggattgacactgctcagtgcgcccggcaatgatttaatagcttcttcagcgctcgccgcggcgggctgtcacatcgttttgtttacaaccggaagaggcacgccgttcggcacatttgtcccgactgtgaaagtatcaacaaataccgatttatttcaatcaaagcctcattggattgattacaacgcgggcagattggcggaagaccaaacaacagaagatcacattgtaagagattttattcaatacattattaaagttgcaagcggagaattcgtcaataacgaaaaaaacgattttcgggagcttgcaatctttaagtccggtgtgacgttataagggaaaaggcgatctgacaacagaccgccttttttatattagttttattccgctgattaaaataatcgccgccatcacaaactgcagcgggcgcggtgagaatttcggcgaaaagaagctgccgagaagcacacccggcacagagccgatcaacagattcaatacaagcaggtaatcgacgcttccgaagcttgcgtttaacagaccggcaacagttacgagcagaaaggcatgtgcgatatccgttcccaccacttctgccgttttcattctgaacaggtatagcatggcgatcgcaaataatgagccggatccaatagatgtcaggccgacgatgaaaccgaaaatgacgccgatcaatatcatgagtgtccgcttttcttcaagcgttttttgctgccagcggttcggccgcagttttttatcgaaaaaaaggcgggcgataatggaaatggcgacaagggtcagtacgtagccgagcgcctgtttgataatctgctcctgatgctggtgaaaagcgggaaacaagtgaagaacaccgatggcggctgttgcgctgggaatgcttccgagcgccaagtagccgacaagtttaaattgaacggtgcgctgcttccaatgagaaacgacaccgaacagtttggtgatggagttatataaaaggtcagtgccgacggcgattgaggggttgatccccaaaacgatcagtaaaggagtcaaaagcgctgctcctcccacacccgtcaatccgacaagcgttccgacaaagaaacccataaacacaatgcttacagtcatctgtgtgcctcctgaataatcctactatttttatcagattatatatgattaagaggcagtaatcaattaaattttcggaaaattttatacagaacaaaaaatccgccagcctgctgttatgtcgcagaccggcggatggccggattatgatttttgctgataaaacggaagttccgtgtggcccatttctctgacatacacgaaaagattgcctttatgatgaatttcatgctccatggcaagctgaaggagagccgcgccggtcacttttctgccgaaagaggcggtcaggtcaatttcgcggttcagctgatcttctgtcagctgtgacaggatgtctgtcgttttttcagtacacgtttcagccagtttgacgaggtctgtttctgcttcttctttcggtttgttctggatggctgatccgtttccgtcgttaatgacgtttgcaaacataagaaaagaataaaccatgtgttttacaagttcctgagcggacattgatgtctctgccggcttgtaatcgtaatgttcgcggctgattttttccgccagctcaatcgtcacgtttcgatgtgacagaaagtggctgaccaattgattttgtgctgtcatgtgaaaacccccatttaatacagaataaaaagctgcaaggatatgctatatcaacggcacggaagaaacaagcaataagcttgtgacggagataaatcgttgcggatatccgaaattcgacaattgcggtctttttgcgttcttctttttctagcaaatatgataaaatatgacatatctcggtcattccaaaaggggggatttattgaggatgaagcagactattccgtcctcttttgtcgggctcaaaattaatgaatggtatacccatatccggcagtttcacgtccttgaggcggagcgcgtcaaacgtgaagtagagagagagatcgaggatatggaagaagatcaggatctgctgctgtattattcattaatggaattcagacaccgtgtcatgctggattacatcaagcccttaaaagaggacccttctcagcctgagttttcagaattattggaagacattgaaggtaaccagtataaactgacaggactgcttgattactactttaatttttttcgaggaatgtacgaatttaaacagaaaatgttcctaaacgccatgatgtattacaaacgggctgaaaaaaaccttgcactcgtttctgatgacatcgagaaagctgagtttgcttttaaaatggccgagattttttacaacctgaaacaaacctacgtctccatgagttatgccgttcaagcccttgaaacgtaccaatcgtatgagacgtacaacgtccgcagaatccaatgtgaattcgttattgcagggaattatggtgacatgcagtatccagaaagagcattgccccacttagaacttgctttagatcttgcaaaacaagaaggcaatccccgtcttatcagttcagccttatataatctcggaaactgttacgaaaaaatgggagacctctctaaagcagccgaatattttgagacatccgtttccatttgcaggtcagaaaagttcgataatcttccgcattctatttactcattaacacaggttctttataaacagaacactacagccgaagcagagaagcagtaccgtctcgggctcagtatcgcccgcgaatacaatgatgaattgtttgtgaatctgttccaatttttacatgcgttatacggcaaggaaatggataacgcatccgtcaggcacacgtttgattttctggaagaacacatgctgtatccgtatgttgaagaattggcgcatgacgctgccaaattttacatgaaacacggacagcctgaaaaagcgctcacgttttatgaaaaaatggtgcacgcccaaaaacaaatccagagaggagattgtctatatgaaatctaaactgttgtcaggattgctgcttgttgctgtcgggttcagctttacacaggtgatcggtcatgaaagccatttggaaaaccaagcggacggcacattccatattgccgcgcgcaaccaaacataacataaagacccttctgtggaagggtcttattttttgcatgcgtatccattccatttttatccgaatgcagggtctatatgctcaagttatctgtcctacgaatgccacctattgatgaaaaaggcataaggagagatgaagagtggggattgaagtgaaaaaacggctcgtatcggctgataaatatgcgttaaaatgtccgaatccgatgacgccggagtatattaccattcataacacggcaaacgacgcatccgccgctaatgaaatcagctatatgacgggaaacagcgaatcaacgagctatcattttgcggttgatgacaaagaagtgatccagggaattccgttggaccggaatgcctggcattcgggagacggcacgaacggtaccggaaaccgaaagtcgattgctatagaaatctgttacagtaagtcaggcggcgaacggtacagagccgcagaagaactggcgattgcgtttgcggcgcagcttttgaaagaacggggctgggggattgacagaatcagaaagcatcaggactggaacggaaagtactgcccgcaccgcatattgtctgaaggccgctgggatgaagtgaaggcgaagattgaaaagaaattaagcggaagtatgccggcgaaaaaagcctctatttcttcttccgcgtctgaataccatgtgaaaaaaggcgacaccttatcggaaatcgccgcatcgcacggtgtcagcgtaaaatcgctgcaaagcatcaaccatatcacagatccgaatcacattacagtcggacaagtgatcaagctcgctcagacgggttcttcttcaaaaagtcaggctgtgtcttcctatccgcttccatcaggtgtgatcaaagtgacgaaaccgctgacgaaagggacaaacgtaaaacaagtgcaaaacgctttatccgctctttatttttatcctgataaaggagcaaaaaatcatggggcggacggcgtttacggtccgaaaacggcaaatgccgtaaaacgttttcaatccgtcagcgggttaacggcagacggaatttacggcccgaaaacgaaggcgaaaattgaagaaaaactgtaatcaataaaacggaagctctccgggcttccgtttcttcttacatacaaactgcggcaagggccttttgaatatcataaatgctttcatcttttttaaactgctttgagacagcgggaagttccgcgcctgaaatccaaattttcagctctgaatcaaggtcaaagcggccggcggtttctacgctgaatctggaaatgctcttgtacggaatggattgaatctccgttttcttccctgtgagtccctgtttatcaacaagaataagacgcttatccgtaaagacaatgatatctcggacaagcttaaatgcggcgttgacattctcaccttccagcagaatacgagccagttctgcttttgcttcagccgtcgatattgtcgacgcattgcccagcaatccattgatgaaccccatgatatatcccccccctgatacgtattctatcaaatcatactataaaaaggtttccattcccagatgagtagagtaaactggtgctgactggaaaaggagagcatgctacacatgaaagatagatatgacaatttcgcagccctttctgctgctgaatcggaatacagaattatttatgaagaaaaagagggaagtaaatgtatcgtcctcgctccccacggcggcaggattgagccgggtgtcagtgagctggtgcgggcattttctgaccaaagctcaatttatttatttgaaggaacgaagcggtgcgataaccgttctctccatttgacaagcacacgctttgacgaacccctggctttagaaaaagtgaccgcccatcattacggattggcttttcatgggtatcatgatctgaaaaaggcaaatacactcgtcgggggcgcggatctggaaaaagcaagactgatttgtgatctgctgcgtgaagcgggatttgatgccgagctgacagagaagaatgatcggctggcaggtgtaaatccccgcaacattgtcaatcggacaaaaaggaaaatggggctgcaattggaagtgagcacggcgcagagacacgtgctgttcagcaattttggctgccggggagaaaaatatacgccaaccgatctgttttttcggtatgtagaagccgtgaaggccggtttttatgataaatgaacagggggcccgttcttatatttactggagctatgcggcgcaagaagtgcttggcgggcagcacggtgagaacagcgtcatgatgcaaaaacctttcctccgatgtgaaaatgatgacattctgccggcagagtatcgctaattttcaataaaatacggcgttttttcgtcagcggcatgcaagtgtgtctgtccgctttcataatacacattcggccgcttgtcggataacagacaagcgagccgcttctgaaattgaatacctgctttacgccgttcaaacagctccagccttttttccgcaaatgatgccgtcacccggaaagcggctgcgattaaaataacggcatggcttctccgttggggaagctccatgtttaacagcataaaggtcggcacacagaagtggtacataaaatggttggcctgaaattcctgcagttccctgaacagcttgttcatatgaaaatggttgccggtatgcttcagcacatggcacagttcgtgcgcaaaatcctgccattgctcttcgggtgactttttttgattcaggacgatgctgtacatgccgtcccgcttcagcatcatactgtgcgtatcttcaaaatgaatccaaatgtcaagctccttggcaatcatctgcatatcaatatggagaggggcggtcattcccatgcggcaatataagtttttgacgtattcctcaagatgtgttaaaaaatcgcccaattgaatacaccctttcgaacatatgttcttttttaagcgagaaagaaaagccctgatcggactttgaatcaattcccttttcttttaaaaataaacattcagcttttatatcggctgagcgttaagcagtttaaaggaaaagagcggattatttatgtttcggcctgcggtttttctctttttcttttaaataattaatgaattcaatggcctgctgcttgctttccggggaaaagtcctgcatgtcccgatatgcgatctgcaggtcgggatcggcaaacatgtcttcatctgaaggttcttttccggttaacaaataatcagtcgacactttgaaataatccgcaagcttttgcagcgtgtcgtaatcgggttcagatcggccgttttcataatgagaatatctggcgcgcgagacaccgatatgatttgcgacttcttcctgtgttttctttcctctgagattctttaatcttccgcctatcatccgaatgacctctcttttttcaacaccctaagttacttatgattatagatacaaaatgtatcaaaataaagagatgataaaaaaagtatcaaaaaggtcttgatgatacgaaaggtatcgtatataatcaacatcatagggatacggaatgtatcaaaatacgataagaaattgatcaggagggtgagagatgaagccgataatcatccgtttcagcagcaatccggctgaccagagatgtttaggaaaagcaggcggttcgatatcttttaccgcttgcggactaccggtattccgatttgataaccgattgcagtatgaacgctatataggtctgaagacaaacggagacgttccttatgagtcgtaaaagctacccgtttttcatctattccggattattgaattcagaacattatgacaaaatagggtccgccatttggctgtttttatggttcatcagctcaacgacaaaggaacacgtaaaagacggtgtaaagtgggggatcgtccttggtcataagcccgtaaaagcaagagagatggccgatgtatttgccgtcagcgaaaaaaccgtcagacggtggcttgaggttttggaacagcatgaatatatcaaaaccgtccgcgccccttacggactcatcgtctccgtaaagcactcgaaaagattcacgccgaaaaagacattgacccgcccggaagcaactgaccggacaatatcggcggatcaccgggacaaaaatgtccggagagaaatagatataacaaaaaatcatactgctgaagaaacgattaacgacattgccgcccattttatcagattaaggtctgcacaggaggggcggagcgtatacccgtcgccccgggattatcaggccatcgcccgtattgtttccctcggtgcgtcagcacaagaagcaatcaaatggctcggcgaatgctttaccgcttttgaacagcggcgcacatcttcagctgaaacgatcaaggctttcagctattgcgccaagtatatggaagaccgcttgaatgcacgaattgcgggaaggacaatcacaacaaaaaaagagaggaatacgatacatgacaaaacgaacgatcgagcagatactggccgacctgaaaaacggaaaacgtccattactggcggacagaccggaagaatcagacgaaagccgctttgactgtccgctctgtaaagatcagggcggttatctcaaaaaccagctgggaatggatgtgtgggttaagtgccgctgcgccgccgaacgaaaagcagagcgcatcctcagcgcaagtgagattacaggcgcctttcggaagctggatttcaaaggatttatcacgcggggcaagcctcaggcagtcgtcgacgcatatgagtgcgcccttgaatatgttgaaaacttcgacaagattaaaaactgccggaaaaacagcattgcccttttagggcgtccggggtcgggaaaaacccatcttttgaccgctctcagcaattatgtcatgagacagaagcagacacccgtgctgtattttccttttgtggagggatttacggatttaaaaaatgattttgatctgcttgatgcaaagcttggccgtatgaaacaggcggatgtgctttttattgacgatctgttcaaaccgctgaacggaaaaccccgggcgaccgattggcagattgaacaaatgtacgccgtcgtgaattaccgctatttaaatcataagccggttcttatctcgagcgagctggcctgtgacggactggtgcaggttgatgaagccttgggcacaagaatttatgagatgtgcagcgattatttagtcatcattaatggcaattcatttgaagtaaaccacagattagagggggcgagataatgtgtaagctgtgcgggccgaagaaggtcattgtgacggaaacgggtttcggcgctgtctttcacccttgcccgaactgcaaaacaggcactgatttaacgccggtcattaaacgtctcgagcgaatggttcaagacgcaaaagtgaggcttgatgcacgtgtataaatatattaaatggcttttttgcctgctgttcagggcgaaacggatagaaaagcaaattgaagcatggcatgaggctgatggaaagtgaggataaccattgcaagaaaaacacagccccgctccatggcgggccgtacacagcggaaaagaaaaacccatttacatttattccgcttacagcgaagcggataaagagaagttcccttattcaaacggaaggctcatcgcggccgttttcaacttaagttcatactctcagcagatcaacgcggcattgatggcaaaggctccggaactttttgaggcggccgaaacggctctccgcctgctccggggagaaagttctgaagaaaaagaagcgttcataaatgagctcggaagcctcatacatgaagtaaacatcctgaaaaaaacggaggacgtaaaacatgaatcctaaaaaactgactgacattgaacatacaacattacaaagccagctggaagaaggcaaggttcgggtgattattgtagacggactgaagaaggaagcatggctcgccgaagcgccggagcacggcaaaacgcttgtcgaaacgcgaaaaggggatctggcccgggtcgaatatgaaatcggctttaaattgaattaatcgaaaaaaacagaatacgtccaagacggaaagcctgcggacactgatcaatcgcgtacatgctgcgcattggttggtgtcctttttttgttccgaaaaagaggaggatctgcatggaagacttactatttgaatataaacgcacgctgaaagagacgaaaaagtggtacaagcagctggaggaagccgatgaaacggtgcttacttcagaagaactgaaagataaaaaaatcatcagaacgatcattacagatgtggaatatgtcatcgaatggcttgaaaaaggccggcagcccggcataagaagagcgatagaccgcagagacgcttatcagagaatgctgattaaagatccgagaatcatagaaacctattcgcaggcgctgatgtttgaaccttccgggaatgtgactgaagaagacagaatcagactgcgggacgcattagccgttttaacggatagagaaaaagaaatgctgctgctccacaaagcggaatgcttttcatatgaacggatcgccgccttgctgaatgtaaagaaatcaaccgtacagacgacggtcaaacgggcgcttctgaaaatacaaaaacagcaggaacaaagaaatcaatcgcctgcttcataagttgtcatacgtttgccacctagaagtgaacagacgatcacaaaaagcggcccgattagaagccgctttttattatagacaatcatgtcggaggtggcggtgatgccgtagcatgaaaaacgcaaaaagaaaacaggcatttacaatctatcagtctcataaaggccgcatcacaaatcgcgcccttgccggcaaatcaggcgtatccgcaagaacgatcggcagatggaaaaaagaagggcgctgggacgaggcgcttcataagaacgcggaaagcggcggaaaaaacaacccgggcgaaggtgatgagttaaacgaacgccagcggctgttttgtctttattatgtgaaaagctttaacgccacccaatctgcgataaaagccggctattcaccggaaagcgcgcatgtgacgggaagcaggctgttaaaaaacgaaaaagtcgccaaagaaatcagccgcatgaaaaaggaaatggtcaataaagtgtttgtcgaagcgatggacgttcttcaagtctatgtgaaaatcgctttcgccgacattaccgattatgtaaccttcggaaaaaaagaggttcaggccttcggaaaatcagggccgctctttgacgaaaatgataagccgattatgcaggaaatcagctacgttgacgttaaagattcgcaccttctggacggaaccatcgtcacagaagcaaaactcggaaaagagggcattgcaataaagcttgccgacaagatgaaggctcttgaaaagctgtccttgtactttgaccttttccctgatcaatttaaacaaaaaatcgaaaatgaaaaattaaagctggcacagcagaagatggaaaaaacagaagacagccaaaagccgattgacattgtcattacgcggaaagaggaacggtcatgattgaaaaagcggtcaacccgcgctttgaagattatttgttcaattggaatgaaacgtaccaatttctcgtcggaggctacggctcgtcaaaaagctatcataccgcgctgaaaatcatcctcaagctgcttcgtgaaaagcggacggcgcttgtcgtgcgggaggttttcgatacgcacagagattctactttcgccttgtttgaagacattatcggggagcttgagctgggacatgccgtaaaggtcgtatcttcgccgatgcagctgagattttcaaacggaagccggattatgtttaaagggatggacaacccggccaaattgaaatccattcatcatatttcactgatatggattgaagaatgctctgaagtgaagtatgaaggctttaaggagctgatcgggcgtctgcgccatcctgagctttcgcttcatatgatatgcaccacaaatccagtgggcacctccaattggacgtatcggcatttttttcgtgatgagcaaaaaaaacgcttcgtattggatgatcagacgctgtatgaaaaaggcaccgtcgttaagggagatacgtattaccaccactccacagcgtgcgataatctgtttttgccgaaaagctatataaagcagctggacagtttacggcattacgatcccgatttataccggatcgcccgcaaaggacagttcggcgtcaacggcatccgcgtgtttccgcagtttcaggtcatggagcacaacgaagtaacggagcggattgcttccatcaggcgccccctgtttcggaccggcatggatttcggttttgaagagtcatacaatgcggtcatccggcttgccgtcgatccggatcaaaaagagctttatattttctgggagtattacaaaaacaaaatgaccgatgatcagacagctgaggagcttcaggaattggcggatcaaaaagagctgatcaaagcggattcggctgagccgaaaagcatccaatattttcgcaggcagggcttttgcatggttgcggccaaaaagtttccgggctcaagacttcagtatacaaaaaaactgaaacggttcaaacacatctattgctcagacagctgtcaacatacgatccgcgaattacagaacttaacgtacgcaaaaaacaaaaacggcgctctgtcggaagatgagttttcaattgatccccacacactttcagccatttggtatgcgctggatgactatgacgcggcggatctgaaagatgcatcacaaaaacgaagacgtccgaatcgggaaaggaggaggtaggcgttgccgaactatcaaaacgttagagccaccgtctttaaatcaaaaatggccgcgccgcaggcaaggcagatgaacgaagatcaatttgccgatctgtacggcgaagacatcatttcaccgccctataatctcattgaactgaaaacaatcgccgaatactcgacgattcttcagcagtgcattgacgcgtatcgggtcaatattacgggttttgggtttgatgtggaatatacctttgatgtaaatagcccagattgctccccgtcaaaaaaggcccgggccgaaaaaaactggatgaagctggagagcttttacaaatgtcttcattttgatgaatcggccgagacgatcctcggatatgcgatagaagaccgtgaaaaaacgggcaacggttttctcgaagtgcttcgggacggggcgggaaaaccagcggggattgaatatctggatgtgaaacatatgcgcgtgtgcggtgtgactgatcccgttgaagttatattttcttatgaagaaaacggcgcatccaaaacgattaaaaggcaaaaacggtttcgtaaatatgttcagatgctgaacggtaggaaagtgttttttaaggaatacggcgacccccgcatgatggacatgagaaccggcgaatacgtaaagaccctgtctgaagaataccgggcaaatgaagccattcacttaaaaatcggcagcggcacttacggaattccgcgctgggtcggcaatatcgtcaatctgtacggcgcccggaaagcggaagaactgaattttatgtatttcaagcagggccgtcacgtgccggccgccattacggttgaaaacggcatgctgtcagaagcatcgtacaaagagctccaggattatatgaatgacctggaaggggtggaaaacgcccacaagtttctgctgattgaggcggaaggcattgcgaaggaaaaagaccttcacggaggcgaagacattacgcccgtgtctgtggaaattaaatcacttgccgaaattctgcaggatgatgcgctgtttcttgaatatgacgacaaaagcagaaataaactccgttccgctttccgtctcccgccgctttatacgggcgaggcgcaggaatacaacaaagccaccgccgatacggcacggaaaataacggaggagcaggtgtttcagccggagcggaaaacgctgattaataagctcaacacgttatttttgcctgaactgggtctccacgatgtacagctcacattgaaggggcctgattttcgcgatccgcttgaaattgcgaaggtgcttacgccatttatttccgccggcgcggtctctcctaatgacctccgtgatctggccggaagagtgctcggcaagacgcttgaggaatggcctgaagagtactacagccggccggtgctgaaagggaaaaaggagtaatcctgaaagggggtgaaaacatctcgtgccgagagaattgagaaatgccgtcatcagttttgtgagctatgtcgataaggcggcgaaccaaacggaattcttttttacaaaatcagccggaggccttccgtcatttgaaaaaaaggtgcaggtgtttacaaaaagcgaatcggatgagcagaagcttgtttacggcatcgtttacgagccggatgtcccggatgcccatggcgattatatgacggttgaagagattgaaaaggccgctcacggttttttggcggacgcccgcaacatcgatacaaatcataattttgaaggcgggaccggcgaggtggtggagtcgtacgtcgccccggatgactttgaaatcgggaatgctgtgatccggaaaggatcttgggtgcttgtcaccaaagcttccgatgaagtatgggatcagattaaagccggtatcattacgggctacagcatggcgggaaccgctgacgtttacgaagagccggcagaaaagcaagccggcttattcggcgcggtcaagcaatttctcgaccgtgaccgcaaatcaagaaaccgcaagggagaggacttgaacaagatgagaaaagaagacgttagagaatcgattgagcacgcgttgcacccgcttttaaagcggcttgacagcttggaccaaaacacggaagacaaagacggggcggctgcgccgtctgatgaagaaaagctgaaaacgcttgttgaggacatgctcgcgccgattattaaacgcattgaagcgcttgaaaaagtaagaggcgcatcaaagcagccggaagaagagacgggcggccaagagcctgttaaaaaatccatttggagcggactgctttaagcccagtcagaaggaggaactgtagagtgagaaatcaagatatcatcagaaaggcggaaatgtcactttccgctttaaaaagcggcggtttaatgaaccccgcacaagcttcagcatttatccgcatggtgcagaacacgccgaccattttcagcgaatcgcgtgtgattcaaatggaaaatgactcgcagaaatttgaaaaaatcggtttcggccagcggattctgcgtgccgctgaggaaggaaaagccttaactgacgatcagctgaccgtcccggcaacaagtacggtgcagctgaatacgaaagaagtcattgcggaaattaatatcacctatgacacgcttgaaaataatattgaaaaagacggcctgcagcagacgatcatgcagattttggcggagcgggcggcagtcgatattgaggagcttgtcgtaaacggcgatacatcttcttctgatccgtacttggcacagcttgacggaatccgtaagcagactgtatctcacgtcattgacggaaacggggaagagctgtccagagccacatttaaaaaaggcttaaaagccattccggcaaaatatttgcgcctgcctcaggaattcagattttacacatctcaaggcatggagattgaatggaaagaccgtgtggctgaccgtcagaccaacctgggggatcttgcggtgcagggcggtttgtcttcagcattcggcgttccggtcaaaggagtgtccaatctgcagccgtactcggtcggagaaggtgatttccagtacgatgcgtctgacatcattttgactcacccgaaaaatatcattctcggtttttcacggaatatccgaatcgaagtagataaagatattcgcagccgcaaatttattatcgtactgacggctaaacttgacagcaaatttgaagaagaagatgcaagcgccaaaatcgtaaacgttaaagaataagacgggggtggcagttatgttaattcagccgtctgacgttgtttcatattcagtttatgatcaagtcaaaaacaggccggagccgcttcttatacaggacattctggaggcggaggcggaagcggccagaatggcggggcattcgttcactgaccctatttactcaccgcttcccgaaaagattaagcttgcgttattaaagctttctcaatattttgcgctgatcaaccagaatgaagcagccgcttccgcctatcaatctgaaaagataggcgactactcgtatacggtggcaggtgaaggcgggatcagaaaaccggcggtgcaccatctgctctgtgaatatatcgcgccgggttattccccggtttctgcaaacgcaaaggtgagacctttatgagctacgaacggctgctcactgacagatgcgatatttatcatgagacggtgtcagttccgaaggccggacgcttcgggattcccgccgaaaagctccagcctgtcttttcttatccggaagtgcccgatgctgaagacgtgccgtgtctgtttgttgaaaaacagcagcagcttattcagcttgcgcctgatcataaggtatatcagcggtttctcgttcattttccgaaagaggccgctgtgcgtgtcaatgacaaaatcatttgggaaggacaggcgtatattctggaaatgccgaagaaagcaagacagcaccattgggaggttatcgctgtgagagatgacagactatgaacataaaaaaccttgaacaatggaatcggtcgctgcaaaaggcatcatccggagaatttgcccgtcaggcaggcgaatggctggaacagtcaggagaggattttctcgacatggtacgggaggagcttattcattcgggaggaattgatacagaaaacctgctgtcttctttccgaaaaggagcgcaggatcatgtatggatcattgaaaacgggggactgacccttgaaatcggcaccaatgtagagtatgcctcattcataaatgacggacattggaccgtctcagatgaaaatgtcagatgggtgcccggatattttcaaggctcccggttcatctatgatccgtcagcttcaacgggaatggcgctcaaaaaacagtggatcagcgggaatgggttttgggacaaagcccttcttttgtatgaaacactcttcgccgaatcgctggacaagcgtttcaatcagtggcttaacacgttggggggagatatcggatgaatcgcgaaaccggttcaatcgccgcttttttgtatcagcagtgcggcgtgcccgtatatgaaaatgaactgcctgaacaatttcaggtgccgtcactatacattccgcccccgtatgtttttgacgagaatgacacagtctccacctttaagaagacatacagtctgaatgtgaagctgttccatgccgactcggtgcaggcgctctatgcagccgaccggatcgccgatgcggtgagagaatcaagacagctgattccgctgcttacggaatcaggggaggataccggtgatttcgtccgcatcagccgtatcgaaacaagagtcggagacaaaggcgaggcagtgatcacaatccgctggacgagccgctactactatcagaaacaaacatctcccgcactgcgggatgtggacattaacagcggggtgaaagaaaagtgaaacaatataaaaagaaaaacgccgcagcggcggaacgagcggttctttatgacacggcggatttaacaaagcacgcgaaggagcttttcggcgtaaaacccgagattctccagggtgctttattcggcgtgaagcaaaaacaaatgacaaaagcgcaagctaagtcttacattgaagcatttttaaccaaggaggtcatgcaataatgaacggcggaacatttacgcaaggaaaagaaaaagaacgtgccgggatctattttaactttaaaacaaccgcccaggagcgggtatcgatcggtgaacgcgggattgtcgcccttcccgtcgcatccggctggggggaagcgaaaacattcgtttccatttcaagcattgaagatttgaataaaaaagtggggctcagtattgaagatccgtcactgattctgcttcgtgaggcgaaaaagaaagcaaaaaccgttttgatgtaccgtctgacagagggaatcagagcgagcgccgatctttcacaaggtgttaaagcaaccgctttgtacggcggttcaaaaggaaatgacatcatcatccgcatcagtgaaaacgtccttgatcagaccgctttcgacgtgaccacttacatggatgaagcggaagttgacaaacaaacggtgaaaaaagccgaagaattaaaagcaaacggctatgtcacattcacgggaacaggcgaactgtcggcttccatcccgctgacaggcactgaggaagaatcaggggaaacgttaaacccgcaggcaggcatccgtcttgcgggcggaactgataaagcaccggtcaactcagactatacggattttttagctgctgctgaaacggagaatttcgatgtcatcgctcttcctgtcgcggaaaacgatcagctgaaagcgacatttgccgcattcattaaacgccttcgcgatgcgcagggacagaaagtgcaaggggtgaccgcccattacagcggggattatgaaggcattatcaatgttactgaaggtgtgctgctggaagacggaaccgagattaaagctgaagatgcgaccgcctgggtggcaggcgcaagtgccagcgccgcatttaatcaatccttaacattcgttgaatacgaaggcgccgtcgatgtgctgcaccgcctgactcatgatgaagtgatcgaacgtctttccaaaggtgaattccttttctcttatgatgcccgtgataagtcagtcagcgttgaaaaagatatcaactcattggtgacatttacggcagagaaaaacaaaaagttcgcgaaaaacaaaatcgtccgtgtgcttgatgcggtgaataacgatttgacaagagaactgaaagccttaattaaatcgaaaaaaggcacgggcagcgatcttcctgcgacaaatgacggccttcaattcgtcaaaacgatgatcattcaatatttgactacgcttcaggatgcgggcggcatcgcaaattttgactcagatacagacattacaatcgggctgaatgaagaccgcgacggctttttaatcgatctcgccgtacagcctgtggatgcggcagaaaaattctactttaacgtggaggtaaactaagatggcattaaaagcgcaaaacacgatttcaggaaaagaaggccgtttatttctcgacggagaagagatggcgcatattaaaacgtttgaagcaaacgtggaaaaaaacaaatcagaagtaaacatcatgggccgccgcatgacgggacataaaacaacaggcgccaacggaacgggcacggcaacattctataaggtcacatccaaattcgccgtccttatgatggattacgtcaaaaaaggcagcgacccgtattttacgctgcaagccgttcttgacgacaaatcatcgggccgcggaacagaacgcgtcactctgtatgacgtcaactttgattctgcaaaaatcgccggactggacgtagactcagaagcactcgaagaagaagtgccgtttacctttgaagatttcgatgtgccggaaaagctttctgaaacgttttaattaagatcggtatgagtgaaacaggcctttttacaggcctgttttttataaaaaaaagagtaagggagttttcatcatgagcgaaaaaaacgaacaagtatatgatctatcattctttatgccgggtaaaacagtcgaggctgaggagattcgggttccgctttcaaagcgttttgtcgataaaaaaggaaacatcgtgccttttatttttaaagccattacgactgagcgcattgatgaactggagaaggaaagcacgacatataaaaatgtgaagggcagaggccgagtaaaagacttagacagccagcgcttttatgcgcggatcgcggttgaatctacgatttaccctgatttccggtctaaggagctccgcgacgcttacaaaacggcagatccggtcgaggtggcaaaacgcgtgctttcagtcggcggtgagtatgcaaattggctgaataaagcgattgagatcaatggttttgaagatgaattagaagatctggagcaagaagcaaaaaactgataaaagatgggaataaggaagccgtgtatctctattacgcgatgcatgagcttcattattctccatcagaactgaaagagttatatgaagcaccgagacattttaaggcgctgttgtacggtttaatcggttacaagctggacattcttgaaaaacaagcgaagaaagggggagcgacatcatggcaaagctgaccgcccgttttgaattggaagatcgggtttcaaagaaaataaggaaaatccaaaatggcttcagagcgcttgagaaatacaggaaaatgacaaaacgccaaagtgaaattgatatacgcaaagagagtaaatctgttttaagaacaattgaccgcattcagcgctctatgaaaagaaagctgggcgcacaaatgatctctatttcagctgaagacggagccagtgccgtcattcaaaaggtgcaagcccaattagcggatctgcctgcgtctttaaccattaaaataggagcaaaagacagcgcgacagcggcatttgagagattgcgggatctggctgccggttttaaaggatttaccgtttcactgtatgcgtcagacgaagtgacccctgccatggaacgtatcaaacgctatatgcaatctgcgttaaagaacgggtactctgtcactatacgcgtcatagatcacgtcatgaaaacagtcggccgaatttcagcgggcattgattcgctgacgggaaaaaacaatgtcattcaattatcgttaaacgaaaaggtgacagcacagctggctgcaatgcaaaagaatatgccggacgtcggaaaagcttctgtatctgctgctcctgcttcgccgaaaaacgatttttcaatgcttgactccattgcagacaccttcatgaaaaaagtcaatgacatcgcatccaaattttatccggaaacaatcatagcggaactggataaattcgctgcaagctttatgaagaaagcggacgaaatcgcaagcaaattcagcccggcaacgattttagcagagctggacaagttcacgacctcattcatgggaaaagtggatgagatcgcaagcaaattcagcccggcaacgatattagccgaactggacaagttcacaacatcattcatgggaaaagtagacgaaatcgcgagcaaattcagcccggagacgattttagcagagctggacaagttcacgacctcattcatgggaaaagtggatgagatcgcaagcaaattcagcccggcaacgatattagccgaactggacaagttcacaacatcattcatgggaaaagtagacgaaatcgcgagcaaattcagcccggagacgattttagcagaactcgataagttcacgagctcattcatgggaaaagtagacgaaatcgcaagcaaattcagcccggcaacgattttggcagagctggataagttcacaacgtcattcatgggaaaagtggacgagatcgcaagcaaattcagcccggagacacttttagcagaactggataaattcgctgattcgtttatgaaaaaagtagacggggtcgtaagtaaattcagtccggaagccatattgaaagaactggataaattcactgattcatttatgaaaaagatagatgacgttgtcagcaaattcagcccggagaccatattgaaagagctggatcattttactgattcgtttatgaagaaagtcgacgacgttgtcggcaaattcagtcctgataagctaatcgaccgcgccgaacaatttgtaaatgacacgattgaccgaatttctgagaaattcgattttctcaatccggataagattttggaaaaagtggagcagtttacatcctcactgttcggaggcattgataaaaagttcggcaaattcagtcctgatgcgatcatcgaaaaagccgaggcatttgttgataaaattgtcagcaagattgccaagaaatttgagaaattcagcccggacaaaatcatcgaaaaagccggggaattaatagaaaaaatattatcaggaatcgctgaaaaattaggcaaactcaatatcggcggattattaggaggcggcacgaaaaaagaaaagagtaagggcggccttactgccggcggctccaacggcccgaagcgtcctgatctgacaaagggttcacagcgcacggtaacagcgccaaaatcttcaggaaagtcagcaaaaaaaactggcggggctttggggggctgctgctgctgtaccggagtgacgaggggcaatagcagtaaagtcgaagggcgaaataaatcctcgaaaagaggttcctccgtaaaggaaagcaaacaggcatccgtaaacacgccgaaaacaaaaggggcaggtaaaggcatcggcgcgcttttgaaaggcttgggagattcaaaggcgctaaaaggcggtatgaaagggttaaaaggtgccgctaaaggaattcccggcataggtgaattgttatcacttactgatttagccggcatcaataaagataatgcaggagagaaggtcggctcagcaggcggcggtcttgccggagccgcggccggagcggcaatcggcagcgttgttcccggagtaggcacattaatcggcggcgcggtaggcggcatcgccggcagtttaggcggttccagcttgggagaggcctttgattcaggagctttgaaagacacgtggaatgatatttccaaagcggcgcaaagtgcttggacaacaatacaagatacttggggaagcgtttcatcctggttcatggaaaatgtatggacgccggtttcatcggctgtcgtcggagtggcaaccagcatctggtcaaatatcgtgaatgcgtggacgacgattcaagggattttcagcacggtgtcatcctggttcatggaaaatgtatggacgccggtttcatcggctgtcgtcggagtggcaaccagcatctggtcaaatatcgtgaatgcgtggacgacgattcaaggtgtcttcagcacagtatccggctggtttatgagcacggtctgggagcccgtaaaatcggctgtcgtcggagtggcgacgtccatttggagtaaaatcacaggagcttgggataaaattaaatccgttttcagtacggtttccggctggttcatggatactgtctggaatccggtgaaagacatggtgaaaaatgtcggtaaaggaatatcagatgctttccagactgctttagatacggtaaaggatatatggaaagggttaagcggatggtttgagaaacatataaaagaacctcttgtaaaagtgggaacagccatatcagatgctttttctgcagcattcgactgggtgaaaaagatttgggataaaaccggcggcaaaatgatttcaggcataatgaactttgtcacaggaggcggcggagataaaaagaaaacggacaaaaacgccacgggcggctacattacaaagccgaccatttcctggatcggtgaagccggtaaagaatttgtcattcccgttgacaacaatcgcggacgcggaaagatgctgctttcacaagctgcgtctaagcttggcatgcgtgttgtcgatgatatgggcgcggcttcggcccagtcttccgctgcaccggcgggagcgggcggtgtttcttcttctgcatctgtatcggccgcagcgtctgtggattcttccggatttgccgggacggcttcatcactcggcaaacagtttactgaaggctttgacagcggaatcagcaaaaaagcggtggatatggacggctggaaggaaaaaaacatcggagcgccgttcaataccctcatttcgtcttcatccggttacggaaagcaagtcgttgcgggctatgccaaaggtcagaatacttcaccgacgggcaccgattcatttttaaaaacgaaggtgaaaacaccttatcaatcggcggttaatcaatcgtcatcatggggcgccgcaacggtgaaaggatattcggccggacagaatgcaaaagatacgggaacgtcgcaatacgtaagcacacatatcaataaaccgtttgtgcaatcaagagattccgcgaacggctgggggtcaggcctgatcggacacttcgtatcagggatgactgcaaaaggaagcgaagtcaaacaggcggccaaagatatggccaaaaaagtcgaggacgcattcagggaagagcttgatattcactctccttcccgtgtcatgatgagcctcgggcgctttgcttcagtcggcgtcgtcaaagggctcggctcagttgacgtgaaaaaatacgccgaaaaacaggcaggctcgcttgcagcagccttttccggcatgggtgcagcgggaggaagcgtcaaagagtggcttttggccgcaatgaaagcaaccaatacgccgatcagctggcttccgggattaatgacgatcgcacagcatgagtcaggcggcaaccctaattccattaatctatgggacagcaacgccaaagccggacacccgtcacaggggcttatgcagacgattccgagcacctttgaagatcacaaagcgccgggcatgaatgatatcagaaatccaattcacaacgccgctgccgctatcggctatattaaaagccgatacggctcgatcagcaatgtccccgggattaaaagtatggctcatggaggcccttacgtcggttatgccaatgggggtctgattaccaaggagcagatcgcccgtgtcggcgaagggaacaaacgggagtggatcatccctgaagagcggggcatccgcggccgttatctgctgcaacaagccgctcaagcgctcggcatggaagtgtccgatccgtcccagacggaaccggcggcgctttcagccggcacggtttccgcagccgttaaaggcggcggacaaaccgttcaaaaaatgggaacaaaagaaattaaaatcgaattcagcggcgatcagcatttccataacggacaggacgccgacagcctcgccgccaaaatcaaacaggcgctgattgatgaactgcaaaaagacatttataccggagcaaagggggccgttgcttttgactaaatctgtttacgaattttggctgtctcaggggaaggacaagctccggcttcccgttctccctgaagcgattgatatcgcaaacagcgtgcagaatgattccgtgaaagtcaccggacttggagaggtgacgtttatcgaagaactgggagcgaaagaaatttcgttctcttctttttttccgaaacggtacagcccgattgccgaatatcaaagcatcccttcgccggaaaaagccatttcagccattgaagcatggatgaaagcgaaaaaacccgttcagtttttgattacaggaacaaaagttaatgtcacatgcagcattgaaagcttcaattacagcgaaggtgacaatgaaatcggcgaccggaattttgatatcgtactaaaagaatataaaaccgcttcgccaagaaaaatcaaacaaaagaaaaaaacgaaagtgaagcgcccgtccaaagcttcacccaaaacatataccgtcaaaaaaggggatacgctttgggacatcgccggtaagttttacggaaaacacacggagtggcggaaaatctggaacgcgaataaaaccgccatgattaagcgcagcaaacggaatatccggcagccggggcattggatcttcccggggcagaagctgaagataccgcaatgaaacgggtgaaaagatgattgaactatttgtcataaaagaaacggagtggctcgagcttgtcacagaaagcgtaacgctggaaggacacagatatcaggcgccccgctccatcgaagcgacgattgtcgtaaagcagggcagccagacgtattacggtgtatcagagggggatacggttttgttcaaatggaacggaaaagaactattccgcggcattgtctttgcaagaacgcccgatgagcaaaccatcgccttcaccgcatacgatatgcttcaataccttgtgaaaaaccaggacgtttacgtgttttccaacaagcgcgccgatcaaatattgaaaaggatcgccagcgattttcaaattcccgtcacatccattgccaacacaggccataccattaaatcactcgtttttaaaaatgatacaagcctttacgatatgatgctaaaagcgttaaagcagacaaaaagccagacggggcgcaattatcagctctattcagaaaaaggcaggctcggcttgcgtgaatggccggagccgtctgacatatgggtgctggaaacaggagttaatatcacacggtatcaatacagcacctcaattgatgacaccgcaacccgtgtcgtcatgcggctgcaaaaagacaataaaacgataaaggcttccgcgtcagacagcgcgggcatgaaaacattcggcgttttgcagtataccgaaacggtttctgacgacattaatgaagcccagctgaaacagcgcgcaaaagtgaagcaggctgagaaaaaaggcgttaagaaagagctgaaaaatatacaggcgatcggtattcctgggttggaaagcggattgcctgtctatatctcaattccggaaatcgggctgaagaaaacctattatgtagatacggaccgccatgaattccaaggaacaaaacataccatgacgattgacgtcacggagaaaaattcacttccggaggggacatcctgatgagattaagtgatgccattaaacatttagccgtcggagcggttgacgccgaagcgccggtggagctgatgccggccgaagtgacctccgtttcgccgctcgagctgaaactgaaagatcacgacaaacttttgattccgtctgatgcactcattgtaccgaagcggctgagatccggagaagatgatcagctccaggcgggagatcgggtgatgaccgccgctttaacaggaggacagtctttctttgtactggacaaaatttaaccggcattcggacggaactgtaccagaatatcagcctattaaagccgcttcatcatccgaagagggcttttttacatgatcaaatctaaaaggagcgggtgcaatggccctgacaccggaaatcgaatttgaagatttggaggatgcgagtgaggccgttgagacttcacaaacctaccgaattgattttgaaaacaaccggattaccaatgaactgataaacggactggacgcaatcagacaattcgtctatatcgctcttcacacagaacggtattcatattcggttttcagccatgatattggaaacgaacttcaggaagtgctttcagatcagaacacgacggatgcttataaaaaaatggagattccaagactgatagaagaagccttgctgtatgatgaccgtattttggctgttaccaatttggagattgagaaaaaagatgatgccttcaccgtctcttttaccgttgaaactgatgagggcatgcttgagatagaggaggtgctgggtgaggatgtttgaagctcagacgtttgacgacattatggacagaatgctggcgcgcattacggcagatattgatacgagagaaggcagcgtcatttacaatgcgctcgcgcctgcggccgctgagctcgcaaagtcttatatttggcttgataccgtgctggagctcgtgttttccgatacggctcagggagaatttctggacaggcgggctgctgaagcgggaattgaacgaacacctgccacaaaagcggtcagagccggagaattcacagcgggcatcaccattccgccaggctcccgtttcttcgttgataacctgtattttcaatatacggaggatggaacgctcgagtgtgaaacggccggagaagcgggcaatgccggcattacaggtcaaaatctgctgccgcttgatacgattcccgggcttgagaaagcggtcatgggcgatatattaattcccggccgtgaagaagaagatgacagcagcttaaggacgcgctattttacccgtgtccgccgggaggcagtcagcgcaaataaacagcattataaacaatgggccgaagaggttgacggcgtcggcagggcgaaaatctttccgctttggaacggagccggaacggtgaaggttgtcatcacaaatgcgaatttggaaccggcatcagatattctgatcaagaaagtaaaggattatattgatccggacgaagggcagggagaaggacaggcgccgatcggagcggcagtaacggtggaaagcgccgtatggaaggaaatcgaaatctccgcttccgtgctgcctgagctgaacagctcgatcgatgacgtgaaagcggagattgaaaaaggcgtcctgaatttatttaagaaaatggccttcgaagaaaacaccgtccgtttatcacaaataaacaacatcgtttataactcggcatccgtcagtgactacgccgatatcaaaatgaacggtgcggcggaaaacctcgtgctcagtgacgtggaaattcctaaactcaaagaggtgataatccttgagcagactcgatgagatgacggcgtacctcccgccgtttttaacccgattaaaggagatggcacaactgcttgaggcggaagctcctgagtttgagcggcagaataacgatattttcgatttgacagatcagctctttatcacgacggcgacgtgggggcatgaccgctgggaaaaaatattaaaaataccgcgggaatcaggtgacacggaggatatgagacggctcaggctgatttcaaagatgtcgaatattccgcccatcacacatcaagcgatcgagcaggcgctaaaccgttttttaaaacatccgtcagcttacgttcggatgtttccggggcagtatcgtttttatgccgatatcgggcttgatgacctgcagcacatgaacgagctgattgaaacgcttgaaaaaatcaaacccgctcatttggcgtatacactgagagccgcattaaacgaaacactggaaatcaaagaccgggtcattctcaacaatcggagataccgaaaagtcagtgaactgaaggtcggttattccgtcacactcaacaataacgaggtggtcttaccatgatatcagccgcttacagacagcgtgccgcagccgatctgaaaaacaggatcacaaaagtgctgttaaacggaaaagaaactccaattgcggacatttccgtaaaagatgccgcagtcaccgttctcacacgcagggaagaagacgtcaaacacattgaaaccgtgcagatgcttgacgaaacaggaagcgtcatcacagaacgaaaaacaaatttagatctcagtaataacagaacgcttgatttaagatttacctttgaggtggtgtaacgatggcttacgaagaaaaaacagactggcttccggacgatccgattaacgaagatgacgtcaaccgctgggaaaaaggcataaatgacgcacacacggatctggcggcccataaaaacgacatgaacaacccgcacaaaacgacaaaggcgcaaatcggtctcggaaacgtagacaatgtccagcaggcaacaaagaaagattttgatcagcacaatcaagatctggaccggcatgtgacgaaggaagagcgccagaagtggaataacgggcaattgtctaaaatgacaaaagataatggctccgcttttattgatatctctgacggacaggattttcatcagaccgctgccagccagaataagacctttactttctcagcggctgcaactggagtaaataccccgcctaaaccgtcagagggtatatacctttattcttcaaagaataacggagaggcggccgctttctcagatgacgggggattttggagaaaaacgctgaaaaacggcatctggacggaatggatgccatttgaaaccgctgccggagcacaagcaaaagtaaatgagcatgccgacaaaacagatcttcatgtaaccaagtctgacaaagacaaatggaatgcagggcagttattcaatctgactgacaatgacgggaatgctaaaacggtaacggaaacaaacttagacaatataaaaacgtccggtatctactatatatcagttcagcatacggaaaataagcctgcggaatacggacaattaattgtaatgcaaagaacccgcggagcatcaccgacgtttgtccaaatgtttatagacacagtgaccgccggaaatcccatatacgtccgaagtttcagcactaaaggcgtatggtcggaatggagccaaagagaaacagatgcaggctctcaagaaaaagtagacgctcacgccaataaaaaagacatccatgtcacacaggcggataaaaatatctggaacggcgcacagctttcgaaaataacaaacgataacggcggctatcttcttacaattggtgatgatgataactttcttgaaaaaatcgttaaaaacggcagggcgttcggcaccttttattcaaccggcaaagcggcaaacagtccgagcaacgcttcgacccgcggcatgtttcattttacctctcttgacagtgagggaaagggaacgtttgggtatgtcattgccgtcgattataaaaataatatgttcacgaactatttggatttgaacttgggctggcagggctggcggcgcctcgttactgaacttgatactgagaatgtaccttggatcaatgttccttataaaaatggcgctaaatcaggagacaggccgcttcaataccgcaaagtgggaaacacccttcacctgaacggacacgttcttacggacagagaagtggtattcgggagtgtgccatcctcttgtgcgccggccaaaggcgttgtgacgatggttgcagccagcggcaccaccggttacagcaaatttattatttattctaatggagatatgaagctgacgggaattatggccaatatagaaaataacgtgaacggttattatattgaccttgttttggcactcacgtaaaggagcgagaatatgaaattaatatttccgtatgacaatgacaacatttatacaggcactccggttgagctttatccggattctgagacaggagattatatgatgcctcctaacgctgcggactttccgccggaaataaacggcgaaggcatgtggcgcccattttttgatgaagagaaacaagaatgggtggaaacggctgacgaagcatataaagacagcttaaaaaaagatacggctcccgattcaaaccagcttgcaggcctcggcggacagctggcgaatgagaaattggccagaaaagcagccgaacaagcgcagcagtcactcggcaggcaattagcgtctttaaaattagaattattaaacgtaaaaggagaatgaaaaaatgaagagacttaacttttgggtttacgctttgttttataagtgggcctcaatagaaatggtaaaacaagctatgggctatgatgactgctctgccgaagatctggctgaaggtgtggccgcgaagtatatcacgcctgaggaatttcaagaaataacgggtgaaacatacgaaaattataaaaatgctgtgtcataagccaaacggctttttttatttgtcatttttaataaatgagaaaaggaggacggccgatgaaaaagcattcatttgaatttcccgccgatcaacttggcagacccggcgccgtaaaagcttatcgcggtaacaaaaacgattatgtcacacctgttgctgatttgtccggaatggcagagcttcttaccaatacgccgctagaagcgattgaagtatacagccaattcggacaagaccgtttaggagccgtcttaatagacagagtacaggggtgggcttattcggaccgcagcggaactctttttatcgaagagagtgaggataacaattcgtggacggcttcacattctgtcgcagtcaaaggcggagtgctgaccgcttcggggtgggtcagcctgacaaaacgatattaccggttccgttttgaaaatggaaatcaaaagcagtccgaatttgttttataccaatctgtcggtacgggcggtgatatggcgttttcatatacagacgtgatttttcatgaaaatgcagcagaggcgggcgagggaagcatcttctcggcgggcgcttggaaaaaacttctcgtcgaaatcaccggcacggctgagtcgggccatgtcgcgttttgggggagatccatctcgggaaaaaatgtgccgatcagaggaatcaggtctgatgacgggacatcagccgccggtacgtcaggcacagaagaagtgtggtcatttgatattgccggctttaaggaaatcgtcatggaaatccagagcatttccggcgggagcctttctgtcaaaggcacggcattttcgtaagaatgaagcttccgaagggaggtgagaacaatgtaagaggggggagcggaagtgcttctggatgaacaagcggtgcaaaaagaattcgcaggcatcaaaggtgaacaaaaggtgcttgaacagcgggtagccgcattagagcgggtatccgaccggcaggatcagcaaatcatgacgctgaatgaaaaactgaacaaaattgacgaaaacacaacatggattaagcggaccattacaggagcgatcgtgacagcaatctgcacgggcgtcattggcggagccatcgccatcatgtacaatctgctgcaaaagtaagggggaaaccgatatgaaattcgcggacaaaggcacggtcgtcaggacggtgcttcttttgcttgctttattgaatcaaactttgctgatgttcggcaaatcgccgctgaatattcaggaggaccaggtcagccagcttgcagatacgctgtatgccgccgggtcggccgtttttacaatcataacgactgccgccgcctggtttaaaaacaattacgttacagcaaaagggaaaaaacagcaggctttattaaaaataaacaatttatcgaaataggagagatgagaatatggtaaaaatcacacaggattttatcccggcaggaaacaataaccgtccaggctatgcaatgacaccgatttacattacggtgcacaatacagccaataccgcagtcggagctaacgccaaaagtcacgcaagctatgtgaaaaatcccgatacaccgacaagctggcatttcacagtcgatgatacggaaatttatcagcatcttccgctgaacgaaaacggctggcatgccggtgacggaaacggggacggcaaccgtaaatccattggtattgaaatttgtgaaaacgcagacggcaacttttcacaggccgtggcaaacgcccaatggctcatccgcacattaatgacctcgcacggcatcccgcttgcaaatgtcgttgcgcacaagcattggtcaggaaagctttgtccgagaagactgttggatacatgggatgagtttaaagcgggaatcggttctggggaaagacagacgtataccgtccaaaaaggagatacgctgtcggcgatcgcgcggaaattcggcgtcagcgtggcagatctgcagaaatggaataacatcgctgacccgaacctgattaaagtcggacaagtactgatcgtcagcccgccggttgaagcactgtattctcttccggacgaggtgattcagctgacagagccgtacacgtccggcgaaaaggtataccaggtgcaaaacgcgctcgccgcgctttatttctatcctgaaaaaggagctgtcaataacggaattgacggtatctacggtccgaaaaccgcagatgccgtggcccgcttccaatctgtaaacggactgacgtctgacggcgtctatggtcccgctataaaagcgaaaattctgatgcagctttaacaaaaaagctgagtcccgttcacattgcgggattcagccttttttcttttttaaccggttcaatagcctgagattcctcgcccgcatcctcagcgaataagcggaaagcccgaagcgtccgtaatccacaaactttacgtgcctgacaattttcttcacatcatcacctgtcgcatctctttgttggttttattatatgaaagataaggaaaaaaggaataaggacaagagccgtgtctcctgtccttagtgtaatcaagcttttttttgtttatacttgtcaatcagccgctcgttttctttgaaaattctggcggtatgagggctgacctggtaacttgcgatacttgtcattgaacgttttttaaacattttgaacggtttcgctctttgttccggctgcccgttttgaaatgcctgctccatttaaccgtcaccttcctcttctattggcagcattaaatcataaatgctcgttagcgatgtgaaaagcaaataatcgaattccgtcaacaggttttccgacgtgagtttgatcacgtaatggcggttctggactgtaaacggaataagtacaagcctgcctttttgatcatagtagacgtctttacggttaagacgggactgaacgtccgccgcatcaggcatatgctccgtcaagcggtccttatccgattgtgcggaatagtcgcacaaggaagccgtgacattcattttttcggcataagcggccagcaatctgctgatgccttccgcataagcttctgtacttccataatatacatggatcggttcatttttcaacagatattgataggttttcagtttttcaagataggagtgaagcatttcgttattttcttctaaaatttcccgcgtatccgtctctaattcattgccggcgagctttttgatatacgcgctcaaaaagataaacgcatcaataagggcaaagcagacggcaacaatcaaatattgtctccatgcggcaaagagcgattcgggatcatatgtccaatagaccatggagcccagtacaaatagtaaataccacgttttacggatggcaaacattttttcttttacctttgcctcataccgccaggatgcgtacacatataaaatgagtgcggccgccatcgtccacaccatgatctgaaaaaacaaaagcatgagcatccctcacaatttgaaaaatggtctgctatgttcattctatgtcatgacatcattttcctgtcacaaaaaaaaccgcttctgtaaagaagcggatgtcatcagaaaaagagatctaggatgaaaaaggcgatggcgccgagtgtacctgcaatcggcagggtgatgacccatgtaatgagcatccgtttagccgttccccagtttacgccttttacgcggtgggaagcgcccacaccgagaatggaagacgaaatgacgtgcgtcgtgctgacagggagatgaataaacgtggccccgaaaataatggctgcgccggttaagtcggcagatacgccgtttaccggacggattttcataatttttccgccgacggttttaatgattttccagccgccgatggatgtgccgagacccattgccagggcacaagagagctgcacccaaaaaggaatggcatcacttttatgtaaattggccgtcataagcgccatcgtaatgatacccatcgctttttgcgcgtcgttcgttccgtgtgtataggactgaatggcagccgtcaaaatctgcactctgcggaagcgtttatttgttttcgccagattgctgtctttaaaaatcagcttcacgatcgaatatacgataaagccgagaacaaaggcgatgatcggtgataaaataagtgcttcgataattttaatgaaccctttataattaagcgttgcaaaacctgacgctgcaatggccgctccggcgatcgctccgataatcgcatgtgaagagctgctcggaatgccgaaataccatgtgatcaagttccagacgattgcggcgagtaaagccgccagaatgacaactgacccgttgtctaatgtataaggattcacaatgtcctttgtaatggttttcgccacaccggtaaatgtcatcgctccgagaaagttcatgatggcggccatgacgattgcgtgccgcggcttcagcgcttttgtcgaaactgaggtggcgattgcgtttgcggtatcgtgaaatccgttaatgaagtcaaataccaaagcgcatatgacaattaatatcgttaaaagtaatagagtatccattataacccctcgttacgcgtttttcataataatggtttcaaggttattggcaacgctttggcaagagtcggcaatttcctcaagcgtttcgtaaatttcgcggtactgaatcactttaatcggatcggtttctgtgccgaacagattttttaatgatttacggtgcaggttatcacagctgtgctcgtattccttaattttaatggcgtgagggtgaatgtccttcaatcggttttctgcaagcagttcaatcgtgattaaaatttccttcgcgcactctctgatgtatccgctgaacttatcgatatgctcatcggaagaagtgatcgagaaaatctccatcattgctgaaaaatgttcgattccgtcaagcacgtcatcgaggctgtttgtcagctcaaggatgtcttcacgttcaatgggagtgataaaagctttgttcagctctttaatcatgacatgaacatgattatctccttttgtttcaaactcttttaacgtatcggcaaattcctttaaagtcgtctggttcgtcactttaaagttgacaaagtattctgcggtttcgtctatgttttttgcgatttctgttaaaaggagtgagaacttatctttttttctttttatcattaaaaaccctccattgtttgaatgagacaatgcacacatcaaattattatatagccttttgtcgaaaaaaaacagataaagtcgaaaaaaacgcctcttgattttttcgtaaaaacgtgtctcatcctgtttttcttatgttacccacttcgccaaaaaaacgtaacatacttcgaattcagacatcttgcttaaaaagtataacaaaagatgtgaatttgctgtcaacttttgcacgtgattttgccagaaaaaaaacggctcccgtaaaaggaaccgtttttgtcagttttttctgccgtttttcagccaaaaataaagcggcagcccggcgaggccgatcaagagggacagcacgcagctcagtgtatctgtaatgatcgtgctgatcagcacaaacagtgaacccgcgatggccaaaacaggaatgatcggatacaaaggcacgctgtaggcgcgcggttttccgccgcttttttttctgaggataaacacggcgaaaaaggccatgacgtaaaaaatataaatcatgaaaatagagatttcagacagcttatcgggattgctggcgatcataaaaataatggccagcgcgatctgaaatgacacggcaatccacggggtgcggaacgtcggatgcacccgcgaaatctgtccggcaaacggcagctgtttccgttccgccatcgcaaatgagacacgcggaaaagcgagaatctttccgtttaaacagccgaagatgctgacgatgattccgacgctgatcaattttcctccgatgtcgccaaacagcattccggcagcggtgccggtcgcattttcaccgagtttgacgatgtcggtcgcaggaagaatgtgcagcagcgcaaagttaatgaaaagataaatggcggtgacgaccagcagtccgcccgtcatcgctctcgggagcagcttttccggatttttcatttcgccgccgagtgccgcaagcagaatccagccgtcataagcaaacaaggtggccagtatggcagcgccgaaattcatgtccgacatgctgcttgtaacggctgtgaaaatatgctgatcgcctttccaaaggccgaacacgatcatgcagataatcggaatcaatttgccgacagtcgtaattccctggacgatgccgccatatttcgttccgataatgttaatgatgcttaaaaacaaaacggctgaaatcccgatcaatttagaccagccggaatcccaattgaacaagtgcgccatcaaagagccgaaatacaagccgattgctccgataatggcggggccgtaaatgataatttgaacccatccgcacaaaaagccccaaaattcgccgtacacttcttcgagatatgtataaagtccgcccgttttcggaatctgagtgccgatttccgcaacggtcaagccgccggcaagcgtcaaaatgcctcctaacagccacgcgataagcgcggttttcgcatcaccggagtaggcaagtacggcgcctggtttcataaatacgccggaaccgatgatggtgccgataacaagtgagagggcgatggtaaggccgatctcttttttaagtccgttctcttcaatctgcatatcctatccctccagatgtaaaatcgtcatgctgaaaaaactattttccatattgtaaaccctaattgctgaaacacgaataaaataaattttctgattttgttgttttccctaaaagataaaggtttctgcttttgagaaggaaaaaataccgttttaaaaacgaacattaatggttttttaatatggaaggttcgttattttgggagcggcagtctgcagaccgtctgtgaagcagatgggttgactttgcgatccggataacataaattgtatatataaaatatctcgaaatcgagataattgactggaggataacataatgaaagttaatggaatacaccatgtatcagcattgacggctgatgcgcagaaaaatttagatttttatcggaacatcctgggattgaagcttgtgaaaaagtccgtaaaccaggatgaaccgacgatgtatcacttattttacggtgatgaaacagctaatccgggatcggaattgacgtttttcgaaattccgcagattgcaccgtttcatgcgggaacaaacagtatttcttcaatcggtctgcgtgtcccggatgcacaagcgcttcaatattggaaaaaacgatttgaagagcatcaggtcgctcatggcgacatcatgacaatagcgggcagagagacactcgctttttgggatcatgaaggacagcggcttgtgctgacagctgacgaaaaaggaaaagacatcggtgaagcggtgaagcaaagcggcataccggaagaatattctttccgcggtcttggtcccgttgaattgaccgtcccgtatgcagaaccgacgctgcgtgtgttaaccgatgtgctgggcttcactgaaatcggaaaagaaacgcatgaagaccggggcacggttacggtgctggaatcaggaaacggaggcgcgtgtacagaagtccatctcattgaaagaaacgatcttccgcgcgagcgtcctggaaaaggcagcgtccaccatgtggccttccgcgttcagaatgaagaggagcttgctttatggcaccgcatcattacgaaagaaggtttcagcaactcaggcattgtagagcgttattatttcaaagcgctgtacttccgggagccgaacggaattctgtttgaattgtcaacggacggtccgggatttatggttgatgaaaaacctgaagagctaggcaaaacggttgcgctcccgccttatctcgaacatcgccgttctgaaatagaagcacggctgaaaccgatacagtaaatcagaaatcatgacagatgcctcccggcttgacgggggcatctttttttttgcttttttacccgttttgtcattctttttacctatttgtaaacggcaaaataattgtctttgtttattaataaatttttcacatttggttgttacacttgttcaaagttaaacaaaaggagtgaaaacacaggtgaaaatgaaaaaacgcgagatagacgcagtcttcattctcattttactcgcttccgcattcttgaatatgtacaacatctggaatgacgatacggtgaatccttattacaccgcagcggtaacgagtatgcttcaaagctttcataatttcttttacgcttcatttgacgcagccgggtttatcacggtagataaaccgcctgttacataccagatacaaacgatcagcgcgctgatattcggtatgcacgggtggagcgtcatcctgcctcaggcattggcgggtgtaggttcagttctattcatgtacttattaataaagccgacgttcggaaaaacggcggcgcgcatcgcctcatttgtcatggcgtgtacaccgatcgcagtagcggtcgcgcggacgaacaatgtcgatgctttactggtctttttcctcttgttcgccacatggcttctctttaaagcgatcagaaaaggcagactgatctggcttttggcggcattttttgtcgtcggagcaggctttaacacaaaaatgcttcaggcttatatgattttgccggccttcttgctgttctatatgattgcggcaaacaccacgattaagaaaaaaatcatctcattggtaagcgcgttagccgttttagcagccgtttcattgtcatggccgctcattgttgataatattcctgccggcaaaaggccatatgtcggaagcagccagacaaactccgtattggaattggctttcggatataacgggattcagcggctgacagggcaaagttccggcggcggccagggcgggccggacggaaacgcatcgaaagagatgtcttcttccgatggttcttcacaaatgcaaaaaccgcctggccagtcttcaagcagcagttcagcaagcggagacaaaccacaaaacggcagtatgacggcacctccatctaacgggaaaatgccaagcggcggtcaaggaggtcctccaagcggcggagatggcggcggaggaaaaagcggtgcaggcaccggctcgaaaatgcaatcaggttcaggaatgttcggtacgggaacccctggtccgctgcgccttttccaaacggaattatctgatcagatcagctggcttctgccgtttgcgatttttggcatggccggtttattgatcgccggggcgagagaaagaagacgattatcagcagaacagaaggaaacgatcttttgggcagcgtggcttgtgccgattgccggattcttcagtgtggcggaatttttccaccattattatctcattatgctggcgcctccgatcgcggcacttgtcggtgcgggatgggtcgccctcgttcatctgtaccgcaagcaggcgggatggaaaacttggctattgccggccgctattcttgtgacaaccggatttgagctgtttatcctcagaaactacaatgatcaaatcggcgcaggctggagcatcggagcaggcgttctcggcgcagtggcagcaatcgccctgttcgtattcaaacagcgccaaaaaccgctaagttattatgtttcacttgcagcccttctcgtcttgatggtcatgccgatttattgggcgagcacaccgcttctgtacggaggcaacagctcattgcctgaaacaggccctcagctcgcttcaacaagcggaaaaggcatgggaatggataacgcatctgtcaatacaaaactgatcaactatttagagaaacacaacgccggagcggactatctatttgctgcaaccgattccaatacagcggcgccttacattattaaaacgaaaaaagcggtcatggcgatcggcggattcagcgggtctgacccggccattacgctgactcaatttaaaaagctcgtaaaagaagggaaagtaaaatacttcttaacatccggaatgggcaaaggcggaaataacgatattgtgcagtgggttgagaaaaacggaaagaaagtatcttcagataaatggcaatcaagcacagatcagaaaacgaaaaatagtgattcagctgatacaaaaaccagcaaggccgcgggtaaaaacagccgaatgagcggcgggccgggcggaatgaatcagtcagcttcactatacgaacttcaatctgatgaataggaggaaaaaacatgagcagacatattcaatattcaatagtcgtccctgtttataacgaggaactcgtcattcagacaacctatcagcgcctgaaagaagtcatggatcaaacaaaagagcattatgaattgatctttgtcaatgatggaagcaaagaccgcagtattgagattttaagagagcaaagtctgattgatccgagagtgaaaattattgatttttccagaaacttcggacatcagatcgcgatcacagcgggtatggattatgcagaggggaatgcaatcgccgtcattgacgccgatttgcaggaccctcctgaattaatccttgatatgattgagcagtggaaagaaggctacgatgtggtgtacgccgtcagaacgaaacgaaagggagaaacctttttcaagaaacagacggcctctatgttttaccggctgctgcggagcgtgactgatattgatattccgctcgacaccggagatttccgcctgctggacagaaaagtctgtgatgagatgaaaagattaaaagaaaaaaatccttttgtcagaggactcgtcagctgggtcggctttaagcagactgctgtagaatatgaacgtgatgagcggcttgcgggggaaacgaaatacccgcttaaaaaaatgctgaagctttccatggacgggatcacaacgttctctcataaaccgctcaaggcggcaagctatgcgggaatgatcatgtccggagcgggttttctctatatgtttatcgttttatacatgaagctgtttacgaacagcaccattacgggctggtcctctctgattgtgatacagctgttattcagcggcatcgttctattaatgctcggaatgatcggcgaatatatcggaaggatttatgacgaagcaaaagaccgtccgctctatatcgtgcaaaaagcgtacggcatgaaaaacgaaaagatttatcgggaccagcatatgtcttaaccgaaacaccctgtccggccagcggacagggtgcttttatgtgaaataaaagcctcgggatgacagaatgtcccgcggcttttttcattcatctgcggccggtctgcgtgtgcagagagcgcatgatcagtccggttcccgaaagttcagtaaaatgcttgcacccagcgtcatacctcaagcagcgttttgctgaggaagctgaatgctcagctgcagcaagatcaggcctgtaacgaccagcaaaagtcctgtttgtttcatgtgtaagtatcctcctttgtacactaagtcatacggttgatccaggcctaaagtttccactgtacataaaaaatccaaggcggctgccttggatttttgttaagaagatgttacttctttttgagtcagtttcatttttttcgtcatttccttgccgtttctgataatcttcacgtcaacggtgctgccgactttcgtattcttgtagagaatattgcggagttcgctgcccgtgccggtttctttcccttttaagctgataatgatgtcttctgcttttaatccggctttggcagcaggtgagccctgcgccacttctcgaatataaacgcctttattcagctgtttgccgaaaagcccgagtgtgccttcctgatagttttgcggtacttgttccaagtcgatcatgctcacgccgatataagggcgctccacctgtcctttcgtgagaagctcttcggcgatcggttttacatcgttgctcgggatggcaaagccgatgccttctacatcactttcgctgattttcatgctgttgatgccgatgattttgccgtctgtatttaagagcggtccgccgctgtttccgggattgatggcggcatcggtttggatgacgttgatgctcgactcgccggctgacgtagagatcgagacggttctgtttaagccgctcacgatgccttgtgtgacggtgcgggaaaggtcttttccgagcggatcaccgatggcgatgacggattcacccgttctcagagcggatgagctgccgaagcttgccgtttttgtcacgtgtttatcactgatttctaaaacggccaagtctgtcagagagtcgctgccgacgagtttagctgttacatcggtgccgtcatataatgacactttaagggaagaggcgccttcgaccacgtggttattcgtaatgatatacgctttgccgtttgctttcttaaaaataacgcctgaacccgatccggtttccgcatcatcacccgatgaatttgagtttgaatctgagcttgatccgaatccgaataaatcggaactgctttgctgcttctgcagattggtgatcccgacgatcgccggtgaaatgtcttccaccatattcgaaatgctgcttgaatttgccgatgagctgtttgccgatttgccgctgtctgattcagaagatgtctgcttggcggttaccgatgacgtttcctgagcgggagccggattggaagtatcttgagtctgatggtctccaagcggcgtaaatgtatagatgccgagggcgagccctccgccgatcactccgccgagaagcggtctgaaccagccgaagcttcgttttttcttgtcctcgtccggcgcggaatatctggccgtctgcgggttttcttttactaaaaggacttcctgttctttttggtctgtccgattttcatcacgatagttatccatcatgttcactccgtttctctatttcatcatagcatgatttgcctattattactgactccatcttaaacaaaaagtgtgggataataatgaaaagattgtgggaaattgtgaaaaagacgaaatcggacggcggcgctttatattgacaatttccatcggatttgaaataataaatgagatattatgttcaatccttcacatgaaaagatatgaaaattctgtcaagctaatgggggagatctgttagctttttcactttgtcaaatagtcagaaaggagctgtcacatgaaagaaaaacatcactggatcatttctctgcttgctgtattggcggtcgggccggggctgatgtcgaataccgctctttcggctgtccaaagccttgtccggcagacggtcggcggggaaaactttgactcttttcatccgattattatcggtaatatggcatttgccttattcgtgccggcggggccgtatttaagaaaaagattcggctcccggcctgtctatatgatttcgatggccgcgggtgtcatcggagcgctccttgctgctgtgacaaatgatatttatccgctcgccgcgggccgttttttacagggagctgcggcgggcactatgctgatgattatgatcccgatgctggtgctttcgtttccgattgagcgccggaattacgcattatttgtgttgatcggcggattttacgggtccgtcattatgggaaccgttttaggcacggcggcggcaagcgccggccattggcattggctgttcggcatttttggcctgctgtcttttttcggcctcattttcagttatatgtggctgcgggatgacgctcataaaaatgctgaaaaatctccatttgacggcatcggttttctgttagcgggtgtatcagccgtgctgaccgcctatacatttattcatctgccgaaatggggcttttcatcatggcagacattggcgggatttggaggaagcatcgtcattcttctgatcttgctgatcatgcagtacagaaacgaacatgcgctgatttcgattaaacttatgctgattccaaagccgattctgggtgttttcatgatcgctgcgggcagtatttccatagcggtcagtctttctgcatttcacggggagcttcagaccgcatatcatatgtcacaaactcaactgatattcctttatacgagccttttgggaggcgtggccatcgccgctgtcatcagtgcattagcatatgataaagtcggtccgggcatgctcggcataacaggctctgttatactggtgttcgtgaatttccaatggatgacggcggatcatcatataccgcttattctatttgcggggcttttcgtgatgctggcggccgggacagggcttattgtggcagccggactgatgggagccgcgttgggcggaccgcttccggaactggtgaaacgcatgacggcagttcagtttttgaggcttttcatttatatgggcgcacctgttttaatagggtattttacgaaaagagatgcttccggcacgcttcggcgcgcgcgcggcacgcaatcaccgcatgatctgctgatggggacatacagcgatttgtttcttattgctttcatcttaagcttgcttttagtgtgtttatcatttgtcatgaatgcgaccggcatgggacataagctggcgcataaaccgcatgccgtccgtaagcaggcggctgaacagccttcgccgcaggctcctgaaccgatcaggcatcaggtcattcccgatcatgaatacagaagtgcggtcagacagtttcagcgtcatcatataagcaaaaacagtatgtaactttttctatcagcaaacccttttcccggtgaaaagggtttgttttttcccataatggcagaatggtatattgcatgtttcatccttttttaatataatttgttagaatattcataatttaatatcgaaattttaagtaaaaaaggaggcattacatgaaactgtatctatctgtggatatggaagggatttccgggctgcctgatgaaacatttgtcaattcccgcatgcacaattatgagcgcggcagggttctgatgaccgaagaagcaaactggtgcatcgcagaagcgtttaataacggatgcacggaagtgaccgtgaatgacagccactcaaagatgaataatctgctcgcggaaaaacttcaccctgaggcagagctgattacgggggatgtcaagccgttttccatgatgcaggggcttgatgaatcgtattcgggcgtgatgtttatcggctatcatgcgagagcgtcgatgccgggcgttatgtcgcacagcatgatattcggcgtccgccacttttacataaatgataagccggtcggtgaactggggttaaatgcctatctcgccggattttacgatgtcccggtcatcatggctgccggagatgattgcgccgcaaaagaagcggaggagctgatcccgaatgtgacgactgccgccgtcaaacaaaccatttcaagaaccgcggtcaaatgcctgtcccctcaaaaagccggacggctcctgacggaaaaaacagcctatgcgctcaaaaataaagataaggtcaaaccgctgactccgcctgaaagacctgtattaggcattgaatttgccaactacggacaggctgaatgggcccatttaatgccgggcacagaaatcatcccgggaacgacaatcgttcaatttcaggcaaaagacatgccggaagcctatcaggccatgctcgccatgacagaactcgccatgagaacaacattctgttaaaggggtgaacggcattgctgcggtattttatcaaacgttttatcgccatgattatgaccgtcctcgtcattaccactctgacatttgtcatgatgaaagtgatacccggctcgccttttaacgaagagcggggcacaaacgaagcggtccagcgaaatctcgaatcctactaccatctgaacgaacctcttatcactcaatacgccatctatctaaaatccattcttacctttgatttcggtccttcaattaaaaaaccgtcagacagtgtaaacgctatgcttgaacgcgggtttccggtctcatttgagcttgggataacggcgatcatcatcgctgttatttccggactcgcgctcggcataatggccgctctcaggcgcggcggctttctcgattatgcggccatgagccttgcggtgctcgggatttccattccgaattttattatggctacgctgctgattcagcaatttgcggttcatctaagatggtttccggcagctacctggacgagtcccgttcacatggtcctgccgactgttgcgcttgccgtcggtccaatggccattatcgcgaggctgacaagatcaagcatggccgaagtgctgactcaggattacatccgcacggcaaaagcaaaggggctttctcccgtcaaaattgtgatcaaacacgcattgaaaaatgctcttatgcctgttgtgacagtactcgggacgcttgccgcaagtattttaacgggcagtttcgtcatcgagaagatttttgccataccgggaatgggcaaatatttcgtagaaagcatcaatcagcgagattacccggtcatcatgggaacgaccgtattttacagtgtgattctgatcgtcttgctgtttctggttgatttggcatacggcctgttagacccgcgcataaaacttcataagaaagggtgatcctgatgaatctcccgcaagaaacggtaaaacacacagaagtgcccgatgactggtttcagccgggcgcggaaagaaagggtgaaaccgagtcggtcaagcgtccgagcctgtcttacagtcaggatgcgtggcggcggcttaaaaagaataaattggcgatggccggccttgtgatattatgctgcctgtttctatcggctgtgttcggtccgctgatatcaccgcacagcgtgacaaggcagacgctcgccgagcagaatcttcctccgtctttttcacactggttcggaaccgatgaacttggccgggacgtgtttacaagaacgtggtacggagcgaggatctctttatttgtcggtgtgatggcggcgctgatcgactttttgatcggcgtcatctacggaggcgtcgccggctacaaagggggccggacagacagcgccatgatgagaatcatcgaggttctctacggattgccgtatctgctcgttgtcattttgttaatggtgctgatggggccggggctcagttccattatcgtcgctctgaccgtgacgggatgggtcggcatggcgcggattgtcagagggcaggtgctgaggatgaagcatgatgaacacgtattggcttcgaaaacgtttggagcgaaaacatttcggatcattaagaaaaatctgctgccgaatacgatgggagccattattgtccaaatgacgcttacggtgccggcggcgatttttgcggaatcatttttaagttttctcggactcggcattcaggcgccgtttgcaagctggggagtcatggcaaacgacgggctgccggcgattttatcaggccattggtggcggctgtttttccccgcttttttcatttccttgacgatgtacgcgtttaacgtacttggagacggcttgcaggacgcgttagacccgaaactgaggaggtaggaaaaatggcgcagcaagttctttccgttcaaaatctgcatgttactttttcaacatacggaggcactgtaaaagccgtccgaggcgtcagcttcgatttatataaaggtgaaacgtttgcgatcgtcggtgaatcgggctgcggaaaaagcgtgacgtcacaagccgtgatgggtcttcttccgaaacattcggcaaagattgaatccggaagcatacaatttaaacagaaagacctttgccgaatgtcggatcgggaaatgcgggcaatccgagggcgcgatatttctatgatctttcaggacccgatgacggcgctcaatccgactttgaccatagggaatcagctctcagaagcgctgttggaacaccgcgccatgacaagaaaacaagctgaatccgaagttctcgccatgctggatctggtcggtatcccggactcgaaatcccgcctgaagcagtacccccaccaattaagcgggggcatgcggcagcggatcgtgatcgcgatggctctgatctgcgagccggaaattatgatcgccgatgaaccgacaacggctcttgatgtaacgattcaagcacaaatccttgaattatttaagaagattcaaagaaaaacaggcgtgtctattattctgatcacacacgatctcggcgtcgtcgctcagaccgccgacagagtcgccgtcatgtatgcggggaaaatcgccgaaatcggcacgaggcatgatattttttaccgtccggctcatccatacacaaaggggctgcttcgttcagtgccgcggctggatatggaggatagtgagctgtcgccgattgacgggacgccgcctgatttattcgatccgccgccgggctgcccgtttgccgcccgctgcccggacaggatgatcgtctgtgaaaaggtatacccggcaacaaccgtgaaatccaaaagccatatcgtcaattgctggcttcaggatcaccgtgcagagcggctgaagcagcagctgacggcagcagaggaaaaagggggattgaaatgaaaaagagatgggcgatcggtgtgattgctgttgtttcgtttgctctgattggctgtacagccaatgaacaggcggggacagaacccggcaaagcaaaagaacaggggggtgaaacggtgctgcggctcaataacgaaaatgagccgacctcacttgatccgccgatcggatttaataatgtttcctggcagccgctgaataacatcatggaaggattgacgaggctcggaaaagataataagcccgaaccggccatggcggaaagctggaaggtgtccgctgataagctgacatataccttcaatatccgggataacgccgaatggacaaatggcgatcccgttacggcggaagacttcgtgtacgcctggaaacggatgctcgatccgaaaacgggcgcatcttccgcttttctcggctacatgatcaaaggcggagaagaatttaacagcggaaaaggcaaacaagaagacgtgaaagtcacggcaaaagataaaaaaacgcttgtcgtcacattggcggcaccgcaggattattttctgagtgtcgtgtccaatccggcgtatttcccgattaatgagaaggtcgccaaggctgatccgaaatggttcactgaagcaaaaacctttgtcggcaacgggccgttcaaactgacggaatggaagcatgacgacagcatgacgatggtcaaaaacgagacgtattgggataaaaagacagtgaaactggataaagtcacatgggcgatggtcagtgaccggaataccgactatcagatgttccagtcgggggatttggataccgcctttgtgccggcagagctgagcgagcagctgatgggaggaaaaaatgtccgcacgtgggatcaggccggactctatttctatcgttttaacgtaaaaatggagccgtttcaaaatgaaaagatcagaaaagcgttcgcggcagcgattgatcagaaagaaatcacggattatgtgaccaaaaacagtgaaaagccggcacatgcctttgtatccccgggatttactcagcctgacgggaaagatttccgcgaagcgggcggcagtttattaaatccggatgaatcagaagccaaaaaactgctggaaaaaggcatggcagaagagcattatgacaagctgcccgccgttacattgacatacagcacaaaaccggagcataagaaaatagcggaagcgattcagcagaagctcaaaagtgtgctcggtatagacgttaagctcgccaatatggaatggaacgtctttttagaagagcagaaaggactgaagttccagttctctcaaagctcatttttaccggattacgcagatccgatcagttttctagaggctttccagacggataattccatgaaccgcaccggctggggcagcgcggcatacgacggctacatcaagcaggcaaaacaggaagccgatgccaaaaaacgttttgcgctcatgcataaagcggaaaaactgctcatgaacgaggctccgatcattccgatttacttttacaatcaggtgcatctgcagaacagcggcgtgaagggcattgtccggcaccccgtcggttacattgatctgaagtgggcggaaaagtcctgatcttacagcggaaacatacgccgctcttttgccgttaaaggagcggcgtgtttcacttttcaatccggaaaggagattgaaaaagtcatgaaccataaaccgaaagcactgcaaaaaggcgacacggtcggtgtgattgcgcccgcaagcccgcctgagagcgggacgctgcaaaccgcgctgctgtttttagagaatgagcttggccttcaagtgaaactcggccgggcgctgaagacccgtcacggctatttggcgggagaggaccgggcgcgtctcgatgatctccatgacatgtttagtgatcaaaatgtcaaagcggtgatatgcgcgtgcggaggattcggcacgggccgcattgccgccgacatcgatttcggcttaatccgccgcaatccgaaaattttctggggatacagtgatatcacgtttttacataccgccattcatcaaaatacggggctcgtcacatttcacggcccgatgctgagcaccgatgtcgggcttgaagatgctgatcccctgacaaaagcgtcgtatcatcagctttttacagaaacggaatttacctatacggaggacatttctccgcttgaggtgctgacaggcggaagggccgagggagagtttgcaggcggcaacttgtcgctcattacgtccacactcggcacgccgtttgaaattgatacaaaagacaaattgctgtttatcgaggatattgatgaggagccgtatcaaatcgacagaatgctgaatcaattaaagatggccggaaaactgtcagacgcagccggaatcctggtctgtgattttcaccaatgcgaaccgaagcataaagaaaagtcgcttactttagagcaagtgctgaacgattacattgtcaaatcagggaagcccgcgctcaaaggctttaaaatcggccattgttcaccgagcttcgccgttccgatcggagcccgcgcggttatggatacggcggccaaagcggtaacgattgaatcgggggtttccggaagggagtgatcaggcgtgaggattacagatattcaaacgggacggatgtccgtgccgctgaaaaagccgtttaagaccgctttacgcacggtttacaatgctcaatcggtcattgtgaagctcacttttgacaacggtctgaccggctggggggaggcgccgccgacggttgtcattacaggtgacagcgcggccggtattgaaagcgccgtccacgatgtgctgaagcccgctctcttggggcggagcctttccggcatggaagccgttttgtttgatatcagccggctgttggaaagaaatcaaagcgcaaaagccgcggtggatatggctgtatatgacggatgggcgcaaatgcatggacagccgctttaccggcttctcggcggctatcggaatacactggaaacagattttaccgtcagcgtcaattctcctgaggagatggcgggggatgcagaccgttatgtgaacaaaggatttcatattttaaaaataaaagtcggcataggtgacatatcagacgatgttgcgcggattcgggcgatcagatcacgtgtcggcggaaacgtcaaactgagactggacgcgaatcaaggctggacgccgaaagaagccgtgaccgcgatccgaaagatggaagacgccggcctcggcattgagctggtcgagcagcctgttcacaaagacgatatcgccgggctgaagcaggttaccgatgccgtagacacgccgattatggcggatgagagcgtctttaccccccgtcaggcctttcacgtgctgcagacgagaagcgccgatttaattaatattaagctgatgaaagcgggcggcataaagcaggcggaaacaatcaatgcgatggcggaaacgtgcggcgtggagtgtatggtcggcagcatgattgagaccaaactcggcatcaccgccgcggcccattttgccgcgggcaaacggaatgtgacaaggtttgattttgatgcgccgcttatgctgaaagatgatttgattcaaggcggcatcacatacagcggcagtcagattgcgattcccgacgaaccgggtctcggcattaccggtgtgtcgatacaagagggggcgaaaagatgagagcagccgttacagcggcagcagccaacgtatggacgctgccgtcatctccccgttcgtatgatgcgccgatgctcgaaaacccgccgcagatcagaaaatggttagcgtctatgggatatgaagagcggctgcaattatgcacagacaaccttgtccaaacgcaagcgcttttcggggaagaagtgatcattctcaaagaggaaggggaatgggcttttgtcgccgttcccggccagccttcaaacaaggatgtgcgcggatatccggggtggatgaaaaaaagccagctttcaaaagacggctttcatgcatcttcccccgccgtatggattaccaaaccgacagcttttttatatcacacaaacggcgaaccagacttggaagtaagtttcttaacgcgtcttccggcatcaggacgtgagaaaggctttttccgggtggtgacgccgctcggagaaaggttcgtaaatgaagctgacgcagacgagtgccggcatacggaaggacgggcggccgatgtcatcgaaacgggcatgatgtttctcgggcttccgtatttatggggaggactgagcggtttcgggtttgactgttccgggtttatgtattcgatatttaaagcaaacggctatacccttccccgtgatgcaacggaccaagcaaaagccggatgcggcgcggcggtaaacgatatcctgccggctgaccttttgtttttcgcctatgaagaaggaaaaggcgcgatccaccatgtcggtttggcgctgggagacggccgaatgctgcactccccgaaaacgggaaaaacaatcgaagtgctgtctttggaaggaaccgtctatgaaaaagaattatgcaccgtacgccgctgtataagcgaaaagggggaatagaaaatgacggcatctccgctccttgaagtcagcgggctgaaaatgcattttgacgcaggaagaaagaaagccgtaaaagcagtcgacggtgtcagttttcacattaaaagaggggaaacattcggacttgtcggagaatcgggatgcggtaaatcgacgctcggaagggttattctccgtctgtatgacccgacggccggttcggtatcatatgaagggacggatatacaccgtgccgcggcagaacagcggtcggtcttcttccgcaagctgcagatgattttccaggacccttacgcctcgttaaatccgcgcctgaccgtaagggaaattattatggagccgatggaaatccacaatctttacaatacaagaaaagcccgtctgatgatagcggatgaactgcttgaagctgtcgggctccatccggatttcggcagccggtatccccacgaattcagcggcggacagaggcagagaatcgggattgccagagcgctctctctgcatcccgaatttatcgtggcggatgagccaatttccgcgctggatgtgtcggtacaggctcaggtcgtcaaccttttaaaaaggcttcagaaagagaaagggctgacatttttatttatcgcccacgatttatcaatggtcaagcatatcagcgaccggatcggcgtgatgtatttgggccgcatgatggaaattacagaaagcgctgcgctttaccgggaaccgcttcacccttatacgaaggcgcttttatcctcaatcccgattcctgatccgcttcttgaggacaagcgtgaacggattattctgaaaggggagctgccgagcccccttaacccgccgagcggctgtgtattcaggacgcggtgtcctgaagcgatggagctatgcagtaagataacgcctgagcttgaagaagtgaaggcggggcgttttgtcgcctgccatttaatcaaaaaagaaagctgacaatataaagtcagctttcttttttgattaaacctgatgcagaaatgacacgcagaccggatacggaaccggaatgtcagattgaagcagagtcaatttgcctgtttccgggtcgcgttcaaacaaaaccagatttcccgtttcttcgtttgacgcgacaaggaatgtctcggaagggtcaaacgcgaaatcacgcggccagttgccttctgtcggcacccattcaataagagacaattcaccggaatattggttgatcttaaagatggcgatgctgtcatgtccgcggttggcggcataaagaaatctgccgtctttagatatgcggatcgcgctgccttgcgatttgtccgtaaagccttcaggcaaagcggaaatgacctgcaactctctgaattcacctaaggtcgggttgtattcaagcgcgatgacttcattactgatttccgtcatgacataggcgtatttttccgccggatggaaaacgatgtggcgcggccctgaacccggtgcgaaagagtgagttttcacctctgtgagcgaaccgtttttcatttggtaagtataaagcgtatccgtccctaaatcgacggctgcaatgtagttatgctcaggtgtatagcctgcgaaatgggtatgcggtttctcttgtctttcatgaggacctgttcccgtatgagcggcttcggcagccggctcccgcagacttccgtcttcattgacgggaaaggcgtgcacttttccgctgtggtaattagcggttaacacatattcatgtttatcatcaatgctgacgtggcatggagacgggccttcaatcagctggtggttcacaaaagttaattccccgctgttctgatgaatctgataggctgcgacgccgccttttccgtctgccttttcaatggaatacagcatgctgttatcagaattcggagtgacgtatgtcgggttgccgagctttgctgccagcttcggacggctgagccgtttcgcttctgtatcaagttcaaaacaataaatgccttcgcttccgccttttgtatatgttcccgcgtatcctatgtacttagccattcggtttccccctttagagtcttgtcttctctatattaacgtatcttgaaggaaactgccttgtaaatgtttaagatgttctgacaagcggcaaggtgcagcagcggaaggaaccgcctgatttaataatttcggaaaactcggtttcaatgactgtataacctctttttctgagctcgcggttcgtatgacggtgctgcggcaggctgataagtgtctgattgccgattgacaagatattaggaccgagcgtgaattgctcttcttcaggcacttctatcatctcaaaacgttcggcgagaagatcaatttctttctgccgcaagccatttttgcagtatagcgcctccgtttccgagatcatattaaatacacagtccaaatgtaagaaatcctccttgagagggatcggcacaaccgtcatctccggcagcgcctcccgcagctcccggacagccgctttatccgtgcgcttgctcagcccggcgtaaacggtgccgtctgcgatcaagatgtcgccgccttcaatgttcgcttttttcagtcgcgtataggggattttcttattgtcaagcaggttttgaaacactttttcttctccctgccggactgaagccgccatgtttgaaataaacgccgtctcgcctaagacaaatccgatatcccgggtgaatacctgctcaggcaatgcgggatcggcaggcagcaggacgacttcaatctgatgagatcttaaaatgtcaataaactcgctatgctgtttgagggcaacgggtatgttaatattttcttgtttgaaatgtttctgcgttccgttaataatatccttgatggccatgtgttccggccggcataagatgactgtctgcaaagcatcaaactcactgcggcaagccggtttccgcgtggatttgggaatggatacgtccatgtgatatcctcctatcggtattcaatgtgcgtttattattcccggatgtgatgaataatgaaacatttatgagagaatatctaaccaacttaatatttaaaattttagacaaaacagtcaaagtattgtttaatagggtacagatgaatgagtcaaaacgaccagacaccaaaggggagtttaaataatatgaagttgccagaatcaagattttgcaaagaaacaagggttgttaaaacaagcagggtttttccgcttgatacgaataatcacaatacgctgtttggcggaaagctgatgagctacattgatgatatcgcttcaatttccgcggcccgccactgccggtgtgaaacagtcacggcctcaatggattctgtagattttttgcgccccatcggccaacaggattccgtatgccttgaatcttacgtcacatgggtcggcacatcgtctatggaggtgtttgtcaaagtcattaaagaacatctgatgacgggcgaacgcgagcttgcggcaacgtcgtttctgacctttgtcgcgcttgattcaaacgggaaatcggtacccgttccgcggatcgtgccggaaaccgaggaagaaatcatgcttcacaatacggccgttcagcgcgccggagaacgaaaaaaccgcttaaaacacagcaaggccctggccgaggcgctcggaacagataaaccttggtaatcatcaaaccgctttttttaaaagcggtttttttatgctgaaaaaggacttttcctgccggatccataatctattacagggaaaggagacgtggcgtgcatgatgaaacataagtcttccggcaccatcctgacaaccgggcgtatccgtctgcggactatgcgggatgacgatgaagaaaatttgtacgggctgtttaccgacagagaggtcatgaaatattatccttctcttaaaagcagacgggaaacgaaggaatggattgcctggaacaaacgattggccaaaggatacggcgtcagtctttggatcgcagaggataaagagacgggcgcatttctcggtcaatgcggaatcgttccgcagacggtaaacggaaacactttgatggaaatcggctatatgtttgtccgccgccgctggggctgcggctatgcgacagaggcggcgaacgcctgtctggactatggttttcatacgcagcaatacggacgcatagcggcgctgattgatccggaaaacgctgcctccgtccgtgtcgcggaaaaaatcggcatggtgcccggtgagaccgttaccaaatgggagagacagctgacggtttttgacatcacatctgacgttgaacgtttcggcgaaatgtagtatgatacgaacagacatgttttctagggttccgcatgttcatacatggcctggtccgagagaaaacacatatgcggacatatttccgcatatgcacacggagggaaaaaagcccgggagagtcaatctcatgtgagacgactatccgggcttttttgtattgtccggatacagaaagggtgaagaacatgaaatggggtttagtggtcatagcggccgtatttgaagtggtatgggtcaccggcctgaaacatgctgattcggcactggcgtggagcggcacgattgtgggaatcatcatcagtttttatctattaatcaaggcgacagacagcctgcccgtaggaacggtatatgcggtctttaccggactcgggacagcgggcaccgtgctcagtgaaatcctgcttttcaaagagcaggccgatccggtgaaaatcgtgctgatcggcgttttgctgatcggtgtcatcggattaaagctggtcacacaggataagcctgagacgaaggaggagaaggcgtaatgcattggatcagcctgatagccgcgggtctttgtgaaatgctcggggtcattttaatgaatcaatttcaaaaagaaaagaaagtcaaatggattcttttcattatcgccggatttgcggcttctttttccctgctttcttatgcgatggagacaatcgcgatgggcacggcctatgcgatctggaccggtatcggcactgcgggcggcgcattagccggcattcttttctacggcgagcagaaggatgcgaagcgcatctttttcattgcgcttattttatgcgctgccgtagggctgaaaattctttcgtaaattgatttttatcaaatcttcagtataatctattagtaagttacgaattatgaagatacgagggattaaaacagatgaattcatatatgacacagcggctgaaagaataccgccgcgggaatgaggaaaaagggcgcctgctcgtcagctgccccgaccagccgggaattgtatcggcggtgtcggcgtttttgtttgaacatggcgcaaacattattgaatcaaatcaatacacgactgaccctgaaggcggacggttttttcttaggattgaattcgactgcaagggcattcgtgagaaaaaagaggacttacagcaggcgttcgcctcaatcgcccagacattcggcatgacatggagcctgtctctggcaagtgagctgaagcgggtggcgatctttgtatcgaaggagctgcactgccttcatgaactgatttgggaatggcaaagcggcaatatgatggccgaaattgcggtcgtcatcagcaaccacgaagaggccaaagaagtggtcgaaccgctgaatattccgttccattacatgaaagctaacaaagacatccgcgccgaagtggagcggcgccagcttgagctgctggagcggtataagattgatgtgatcgttcttgcccgctacatgcagattttgacgtctgattttgtatctgcccatccgaatcggattattaacatccaccattcatttctgccggcctttatcggcgctaacccgtataaacgggcttatgagcgcggagtgaaattaatcggcgcgacctctcactatgtgacggacgatcttgatgaagggcctattattgaacaggatattgaacgcgtcgatcacagagatcacgcagaggatctgaagaatatcggcagaacgattgagcggagcgtattggcaagagccgtaaaatggcatctggaagaccgcgtcatcgttcacggaaacaaaacgatcgtatttaattgatgacggtccgccggggaggcggactgttttttatggatgaaaatgtcttgacaagaacctgttttctttgcataatataaaaaaatcattgagcgttgaagaggatcagtacgcagaactttctgtgacagagagcaaaatggcccgctgaaacattttgccgcatgaaacctgccgaacctgccttggagtcctgaggggaaaactcaggcgcgataacctggcgttacaggaaagcgggacgcgtgaaaaacgcgttcaaacaaggtggtaccacggaaagcccatttcgtccttatttttcaggacggaatgggctttttttattgacgagagccggtttggattgattgccacggaggagaaacgatgaaaaaacaaagaattgttgtgaaaatcgggagcagctcgctcaccaacagtaacggaagtattgatgaagcaaaaatcaaggaacatacggaagccatttctttattaaaagaaaacgggcatgaagtgatcctcattacctcaggcgcggtggcagcgggtttttccgctctcggctatccgtcgcgacccgttacgataaaaggaaagcaggcagctgccgcagtcggccagacacttttaatgcagcaatatatggaccatttaaaaagatacggtctgacgccggcacaaattttattaacaagaaatgatttctcaaaaagagagcggtacagaaacgcctatgccactgtaatggaactgttggagcggggagtcgtgccgattattaatgaaaatgattccacatcagtcgaagagctgacgttcggtgataacgacatgctgtcggcgcttgtaagcggtttgattcatgcagaccaattaatgattctcacagacattaacgggctgtacgatgccaatccgaatgaaaacccggacgcaaagcggttcgactatctgaatgacatcacaccagaattgctcggatatgccggatcagcaggctcaaaggtcggcaccggaggcatgaagtcaaaacttctcgccgcccagaccgcattgtcgctcggggtgaaggtatttatcggaaccggctccggacgggaaaaactgatgggaattttagacggaaaaggcgacggcacttatatcggcgataaagacctgtcctcagtaaataatacacggcaatggatcatgtttcattctccgatatcaggggaaatcatcattgatgggggagcggagcaggcgatgattcataacgggtcaagtctcctcccggccggcgtcgccgatgtctgcggcagttttccgaaaggggccgtagtggaagtcaaagggcccggcggcattatcggcaaagggcagacgcagtactcatccgatgaaattttagaagccaaagggaagcggagcgaccagctttcaggaacgaagcaggtggaagtgattcacagagatgattgggtgaatttatttgacgagggggaacacaaatgagtgaagtattgcaaaaagcagccttggcaaaagaagcggctgccgaaatggtcatgaaaacgacggctgaaaaaaacgaagcgctccaatgtattgcagacggactcagaaacgaacgccggctgattttaacagagaatcagaaagatattgaagcgggacggaacagaggactgacacctgacattattgacaggctgactcttgatgaaaaacgcctgctcgatatcgcggacgccgtggaactgctgatcggtcttgaagatcccgtcggtgaatcgctggagaccattcaaaaagagaatggattatccattgaaaaaatccgcgtgccccttggagtagtgggcatgatctatgaggccagaccgaacgttaccgtagacgcggccacactctgcctgaaaaccggaaacgcggttgtgctcagaggaagttcttccgccatccacagcaacatagcgcttgtcagtgtgatgaaacgcgcactggggctgtcaaagcttccgattgatgccgttcagctcatagaagatacaagcaaagaaaccgccaaacagctctttacattaaatgacgggctggatgtattgatcccgcgcggcggtaaaaatttaattgatcttgtggtcagggaatcaaccgtacccgttttagaaaccggagcgggcaattgccacgtgtacatagatgagtcagcagatcctcaaatggcaagcgaggtcgttatcaatgccaaaacacagcgtccttcagtctgcaacgcgattgaatctcttttgattcatgaaaaatgggccgaagaacacggacgaaagctgctgaatcagctgacagaaaaaggggtggagctccgaggagaccaggtgatttgcagactggagcctcaagcgaaacaagcagaagaagccgattggggagcggagtatctggcgccgattctcagtgtgaaaacggtgcaggacgtacaggaggcggtccgccacattcagcagtacggcacaaaccattcagaagccattctgacggagaacgccgagcatgcggcttacttccagaccgccgttgacgccgccgccgtgtatcataatgcttcaacccggtttacggacggttttgaattcggatacggagccgaaatcggcatcagcacgcaaaagcttcacgcgagagggccgatggggcttccggcgttaacatctacaaaaatcatcatcaaaggaaacggacaaatccgcgtataatcttttaagcttatccttcaaaaagggtaggctttttttatgcggaaagattgacggtctctattatattgtgtaaaattaaattgtacacaatataacagaggtgaattcacatgacaaaaccattatttactgcaaccgtatcagccgccggcggacgtgaagggaaagtcacgtcttctgacggagtgctgaatcttgatgttgccatgccgggaacgccaagagcaaaaaagctcgaacatgctacaaaccctgaacagctgtttgccgcaggatattcagcctgctttgacagcgctcttcagctcgtagcgagaaaagagcgtctgagtattgaaacagaggtcactgcgcatgtcagtctgctgaaagatgaagcagaccaaggatataaactaggcgttacgcttgaggtcaaagcatccggcattgataaacaggagcttgaagcccttatccaaaaagcgcacggtgtctgtccgtattcaaaagcgacagcgggaaatattgaagtgaagcttctggcagcagaataaaaataaggatgcccattcggggcatccttattttttgccgtgcagcgtattcaaaacctcataaagcgactgctttaactgctttaattcctcttttgaccgtcccgtctgttccagcatggcaatgggaatatccgccgctgttttctgcaaggcccgtccttcatctgtgagcctgatcgtcacggatcgctcgtcttcagccgaccgctttctcatgatgattccgtgctgctccatccgtttcagcatcggtgtcagcgttccggaatccaggtacaaaagctcacccatccgtttcacattcagttcttcgtgctcccataataaaagcagcgccaaatattggggataagttacattgagcttatcaagcagcggtttgtaccgtttcgtcatttcccttgagcttgcgtacagcaaaaaacaaagctgattctccagtttcatatgttcaaaatctttttctgccattacttctttcaccaactctttgtttgttaacgttacccctattgtagccgaaaaacagtccatttcctattcctcatgtttaaaaatatgagcaggggcaatatatacagtaagtacaatgaggaggctgataataatggcattatttacttcaaaagcgaccgcagtcggcggacgagcaggacatattaaatccgaagacggggtgctggattttgacatcatcatgccgaatgcaaaaaaagacggagaaaccggcacaaaccctgaacagctctttgcggcaggatatgctgcctgcttcgggggagcgcttgagctcgccgcccaaaaacaaaaaatcgacatgacctctgaaattgaaggacaggtcagccttttaaaagatgagagtgacggaggttacaaaatcggcgtaacgctcgtcattgatacaaaagatcttgacaaagaaacggcggagaagctagtgcacgccgctcacgagttctgtccgtattcaaaagcaacaagaggaaatgtagacgtcaaacttgaattaaaataaatcaacgaacgaatatcccggattttatatccgggatattttattaacgaaaacatcagtaatgatctcttctctcccggaataagaatacgatatagcacttttgcataatgacaccaagagaaaagagggagaaatcgatgtctcttccaaacataccgaacatcacccccgacattacactctccagatgtgagaccctgaacctccttctttcatccgtggctatggaagaaatcggactatcccatattctgcaggcggaagcggaaaggattcaaatgtttctcggcgcttccggcgatccctccttggaggaattgtcatcaattaatagaagcactgaacggctcctgcgcaccgtcatgaaatcacaactccttttgcagacgaagcttgaggacattatcttcttacaggattctgaagtctgtatggacccggacgacccaagcaatccgagtgatccgggcgatcctgatgacccgtggaatccggacgacccgagcaatccgagtgatccgggcgatcctgatgacccgtggaatccggacgacccgagcaatccgagtgatccgggcgatcctgatgacccgtggaatccagacgatcccagtgatccggaagatccgtgtgacggcctgttttacggccgcattggctgctgtgagtgtggggattgtgaggactgcggttggaagaaaaaaggcggggagcgttcataaaaaaagagacgggtgaagcatatgccgtatccaagcatctcaaaagcgaaacacgcatcttttgaagccatgcattgtctcacgatggcgctgttacatatattatctgtgaccgtggataaaagaaggggttcaaattacaaagaagaaatcaggctgttctccgcattgtgccgctggcagatggaaacaggcggccgtctgtttttaatgatcagcttggaagaagagcagaagcagatgtatgagcggcactttcttgaaatgaagacagttacggaacgaacgaaaaaattcatttctgaaagcccgcgcgaattccgggcgcatccgattacgaagcgggctgtcaggcagcttcaggaatggaatacggaaactgccgaacctgccgtcagatgggtgcggcctgtcatcatcacgatgaacggcactcctgaacggccttggttcaatcaacaactccaaaatcgggaaaggtgagaaaatgagcggaaatgctgaatgtaaactgactctttgcatgattgtgaaaaacgaggagagatacatctcccgttgtttatcaagtgtacaagacatcgctgatgagatcgtcatcgcagacaccggatcacaagataatacaaaagatatatgcaaaagctttcaggcaagagtgtttgatttcgaatgggagaatgatttcgcaaaggccagaaattacgccctgcagcatgccgaaggagattggattttagtgcttgacgcggatgaagagctcgatcaggagacgggccgttttttaacttcgctgcttcatgacggattaccgagccggggccttttgaaaatcatcaattatacggggaagcagctcgatgaaaacgaagcgtttgaaagcatgcagccgagactgttccgcaatcataaaggccttctgtatcaaggcagaattcacgagaatatctcggcttccaatgaggaagaaaacaatgcttttttcacgctcccatgtgtgattcatcactacggctacttggagcaggaagaaaagatcaagcaaaaacataaacggaatatcagcattttaaatgaagagctttcagaggaaaatcctgatccgtggcttgtctatcatttggcaagtgaatgctacagaatcaaagactatgaaaaagcattacatcttgtcaacggctcaatttttcaatttttaagcgaaaaacgaatgcctccgtctctcctgtattatttgaaatatacaatattgcttgagctcaaacggtatgaagaagccgaacaagggattgaaaaagtgctcaagctatatcctgattacagcaatcttcattattataaaggccttgtattatatcatttggaaaagtacagagcggcaatcaaagcatttgaaaacggaacgcaggttgaaggagaaaatgctgatcacttcattttaaaaggtgccgccgatttcagagccttttattatatggcgaaatgccatgctgcattaaaccatgatatgacggccatcgcttacgccaaaaaatccgtgaagttcaatcctcaatttaaacccgcgaaagaacttctgtctcaattaaaaaaggatcagcggacaaacgcctgatcctttttttgcatgttccattaagataatcgaataatgtttaaagctgcaccgacgcttcctccaagcaatgtggccgcacccaataatccgaacagctgaagctggatggtgctgcctgctggcaaagtcacaataaaggagttattaaagtttgccaaagacgcgaccggggcgataatcgaacttgcaggaggagtgccgttgattaaaatacgcgaacttacaagcaagccggccgttaaattaatatggtaggaaatatagtaccgtcctgccggagcaacggtaaatatggtatttgcggcattagccgtaatatctgccgaaaggttttgttcattcggtaaggaaatggtcgtgccgccgacaataactgcgacaacaccgccgcccgtattgctcgcatagccggaagttgctgtcagacttgttccggtgattccggtcggtccggtgccgccagtagcgccagtgcttccagtcggtccggtgtcgccagtaacgccggtgcttccggtcggcccggtaccgccagtagcaccggtgcttcccgccgcagctaaaagtgtatagtcagctgaggctccaggggttcccgccgggctgtttacgtttgcgacgtaagagcttccgttatacaagacaacctgtgcggttgtgtaagtgggggcaatcagcggattaaaagcaacaatcccttgaaggcccgcaccggtgacccccgtaggtccgatcgatccggttggccccgtcgctccggccggtccgactgctcccgtcggtcccgtcggccccgtagcaccagtcggtcccgccagtgtagggatatttgagatactgtccaattttgaaccgagaagaagctcctgtttcattaagctgtcaagcgtatcccggacgctctcattcaggttaagaatatccgcaagacttgacgggggccctgttaatccgggaatcgttccgagcgcgtattggattttttccccttccgcattcagaatatgtgccattcccagctcttccatagcaattgacgaaagaagaaggttaatggtatcgtctctggaaagtgtaacgacaggggtgatattgggcaaattaggctgtgacacaatgtccctccttatgagttggctgaaaatcattttattacgaacaaagttccccgaaatgagcgtaagcagtactgtatcagtatattcactgattctgtccaagtttctgaatggattcccttcattaaccaattgagcgggttataccgctgtttttgatttcatcatatatgaaggaaatactttaaatatagagaaaatacatcgcacagcattcgcaaatcggtcaaaatgacagcgggacatgtgatcgtctataaagcgatggctatatatcttgtgcgtttcctgcaaaaactctctttttcatttcaagttttctgtataaaagggcgagaagcatggatgggatcgtacaaacaatcattccgataaaggcataccggggttcaatttcatataaaaaacctccgaaaatagtaaataccgcagtgctccagctgagagcaagcgctgaatatatgccttggactttcgggatttgcgcgggtgaaatatttttaattaagtatttcataaatgcatagtgtcccatcgcgaatgaacaggcatgcagcgtctgcgcaatacagaaaatgatgacatgcggaaatgcaaatacgagtatccagcgtacggtagcaccaagcgccgccaaggcgagcaaagagcctgccgtaaattgatgaaagtatcggtcagcgattgcaaagaagataatctccgcgataacggcgatgttgataatgattccgatggcatatgcgggggcatcgatttcctgcaaaaagagataaccgtaattgtaataagacgcgtgtgccgcctgcagtaagataacgattgcgagcaccagaccgaaatatttgatgcggaataaagcaaacatgccctcttttcttgcgcggtctgtttccggccgttttgaaagaacagctggcgcatgcataaagctgaggcatgcgaatatcagggtgcccaaaagcagtgcccataaaatcgcttgatctccgaatatacctgtaaagacggacaggatgacgccggctgaaacaaaacccgcggacccccactgtcggcttgtcccataggcctttaattcgttatgctgtacaaggacgccgcaagcgctgtctaaagcaggcattaaagcagggtaaaacacatgcagcactaatgtgacaagaagcaggctttgaaaagaatcagcgggaatataacataaaagtgcgagaagcgtcccggttctggcgccgtttaataaggctttgctgctgaattttcctgataaataagggaagaaaaataatgtggaaatccctcttgccgccaagcccaggctcataatgaaactggcttcggatacggaaaccccttttatatgcaccatccatcccgtccaatagggcagaaaaacaccccatgtcataaaaaaactaaaaaaatgcagactcatccagcgatatgctttcattcccgttcctcctttaattggcatgttatcatgtaaagacataaagacaatatgagatatctcatatttttggggtggacgatggaagtttataaaggcgagaaaaagcggcatcagttagaaaaacactcaatcgcgcatttattctctttccccgctgaagagtttatggaagtgcgcgaatatgagcgggacgaatggattattcaagagggcaggaggcctgacttcctgttttacgtgattgaaggaaaagcgaaaatatatgtaacccaccaaaacgggaaagtttctttaattaattttatcaacaaaaatgattacatcggagagatggaactattacatgaagtgtattacacaaaaggaattcaagcctcagcgaagactgtttgttttgctctgcctatttaccgctgccgcgcgcaattgctgcaggatgcgaaattcctgcgtgagctggctaagtttttaagtgctaaggcaacgcttatggcttcgaaatattcacaaagtctggcgttcccgcttgaaaaccggcttgctgattttattttgcagacggcttataaaggggtttataaagagaagcacgtaacggtctgtgattatttgggtgtatcttaccgtcatctcttgcatgtgctgacgcaattctgccaaaaagggtatttgcaaaaagaagggcggggctatcaaattaagcagcatgattcactaagtgaacttgcgaaggcgctgaagaataaatagcacgcccagaaaaaacagccacccgcgatttgcggatggctgtttttttatacaagctgagcttgtttttttcgtgcctgtttcgcggcgtcgaccatattttttaatgccgcaacggtttcttcctgctgtcttgttttcagtccgcagtccgggtttacccagaagcggtcagtcggacacacttcaagcgcgtcatcaataatttgatagatttcttcagttgccggcacacgcgggctgtgaatgtcgtatacaccgagtccgaggcctttcacgtaaggatgttctttcaagtattctaaaaatcctccgtggcttctgctgtgttcgattgtaatgacatccgcgtcaagatcattgatcgtatctacgatatcttcaaagttgctgtaacacatatgcgtatgaatctgcgtctcattttgcacagaagacgtcgttaaccggaatgcttctgcggcccaagttaaatattcatcccaatcctgcgtttttaacggcagtccttcgcggagcgcgggttcatctacttggataatctgaataccggcatcttcaagcgcttttacttcttttctgagggcaagcccgatctggaaggcgatttcttttcttgaaatatccacacgcgggaatgaccagtttaagatggtgacaggtcccgtcagcatgcctttcatgtgtttttccgtcagcgattgggcgtagaccgtatcttttaccgtcatcggttcgataaattcgacatctccgaaaatgacaggcggacgtacgcagcgtgaaccgtaagactgcacccatgcatatttcgtaaaggcgaatccggccagtttttcaccgaagtattcgaccatgtccgtccgctcgaattctccgtgaacgagcacgtctaagccgatttcttcctgaatgtcaacccagcgcttcgtttccgcattaataaaggcttggtactgttcatccgtccaatcttttttccgccatttttgccgtgcgctccgcacctcggcagattgagggaagcttccgattgtcgtcgtcggcagaaggggaagaccgagtgattcattctgcagcgccaatcgttcttcaaagcttgccggccgggagaaatctttttccgtcagctgattcagctcttctttttgagctgagttcgctcctgttgcgaatgcttttaaagccttaagtgccgtttttgattcttcgatctgctcactgacggccgctttgccggacagaagcccttcttttaagacgccgagttccgccagtttttctttagcgtatgacaggccgttcagcaaatccttttcaagatgctcgtcagggtgtttcgccaccggcacgtgcagaaggctgcttgaaggctgaatccataactcctcaacatcagcgtggctgaggatatccagagctgcatcaaggcgttcttcaacatcgattttccaaatgtttcggccgtcgaccacaccggctgccagcactttatctttcgggaagccgtgctttttcagctgctcaaggtttctgcctttatcatgtacgaagtcaagcccgattccctgtacaggataagaaacgagttcttcatatgcatcaaccgaatcgaagtatgtctgcaggaggacattcagtcctgaaagctcttttgtgatcgcttcatagagttcttttgcggcacggacgtcttcagaagaagctgtcacaagggccggctcatcgatctgaacccattttacgccttcagcttcaagttctttcagcagctgaacataaagaggaacaaggcgcttttgaatcgctttcgcttctgattcttcgtatcctttcgcaagtgtgacgaatgtgtacggaccgatgatgacaggttttgtttccgctccgaattcttctttgatccggcggtagtcgtcaagctgtttgtttctcgtcagacggaattcaatgctttcgtcatattcaggaacgatgtaatggtagttggtattaaaccatttcgtcatttcactggaaacggcgtcttttacaccgcgggcaatcgcaaagtatgtatcaacgggatccgtgatgctgcggaatctttccggaatccagttaaagctgacggcggtatcaagcacatggtcataatgggtgaaatcagagaccggcacgatatcgatatgttggtcaagctgtgttttgacagctgataagaataaaccgtcaagctctttaagaaacgtttctttgtcagtgtttcctttccaataagcctcaagcgcttttttccattctctgttcaagccgattctcggaaaaccgaggttcgaagttttgattgttgtcattaagtttcctcctttaagtgagatgtaacaaaaaagcctctttctcatgagagaaagaggctttaacttcaaaatgcaagcctctcttatctctcagatcatgtctgatggaattagcaccgtgccttatgagacagtcgtctcggcgcaaaaatcacgcgccccatttcacaatggaattacggtcggttgctgttggggtcaaaaggccaatccctcgcccaactctcgataagagaaaatatttaaatttttttgaaaagttacatcatttgttggttatcttatcagcttattcagaccactgtcaatagaaaatctcacattttaaaaattggtgatatgacaagctgatcaatcattatatgagaaaaatatcagaaagacagcagctgtgcctgttcggctctttccatcagtacttcaggcgcgtctaaatacagaaatccgttcccggccaatgttttggcgatgtccaaaggaagggtccgccgcacgagctgggcgtagacttcagcctcagaaagcgtccgctgaaacgcgtcctgttcaagcccttttattaaggcaagcgctccgctcacatgcggggcggccattgaagtgcccgtcagcttcccgtatttatggttgggaagggtggagagaatattttctcccggagccaccaggtcaatctctttattagtgtttgaaaattcagacgatttacgggcgattgagactgatccgactgcgatcacctcgttgtaagcggccggatacgacagttcctctgtacgctcgtctccgtcgccttcgtttcctgccgcgcaaacgaccagaacaccgctttttaccgcatttgcgacggcttctttcaattctggcacatcgcttggcccgccgagtgacatggaaatgatatcggccttttgttcaacggcgtagttgatgccgttaatgatccattcgtatttgccgctgccgttttgaccgccgagaactttaacgattaaaaggcttgcttccggcgcgacacccgaaattccgccgtttgaatcattggcggcaatcgttccggaaacgtgtgtcccgtgtccgttataatcggaaatcgcgtcttctttgcctccgtcatcatcggtgaagtttttcccgccgacaattcggtctttcaaatcaggatgattgatgtcgcagcctgtgtcaagcaccgcgattttaatatccttgcctttaaacccttttgcccacaactctggcgccttaatcactttaatcccctctggaagctcgttcacctccatgatctgttcatccgtgacataaggaatcaaatgcatttcaccattcataaaaaagccctccttttttatgcttgcgagtggatacaagggtgttactactattttatggcagagcatgccggccggaaagagtcatttgaagcattttcataaaaaaggcgtaatctatcgcactaaaaaatttcaaataaatggatagtttaacagcttttattttcattcatgatccgctgacggtataattggaaatgggaaaggagaagagatatgaagataagtgaagcattatacaactatttttcagaacaagtggatcaaattgcgaaagagtggatcgaaacgatggaagattcggatccgaattcgatttattctttgacaaatcccgtcatcacagaagaactgacggagcaggataaagaattttaccggcatattaataaaatgtatatcatgccgaaaaaagaatttttagaagagttcgagcagtgggtgattgagcttgcgaaagaccagaagcatctggatactcccgtacagtatgtggtccgtgaattcatgagaaaccggagactatacatcagttattatgatgcgtttgccgataaacatgaatcttcgtttgcacagggagaaaggaagaaatgggagaatttaattgtacaagtatttgattttacgatttacacgtttgtcgatcatgccgagcataactcaaaaatgcagctgaatgcgcaaagagaaatgattttggagttaagctcgccggttatcacgctgagcaaacggacggcgctgctgccgcttgtcggcgatattgacacggagcgcgccaaattcattcttgaaaatacgctgagcacatgtgcaaaacggctgattgaacatctgttaattgacctgtcgggtgtagtggttgtcgatacgatggtggcgcatcagatttttaaattagttgaggcgctgaaattgatcggcgtcacgtccactttatccggaatcaggccggaaatcgctcaaaccgccgtacagctcggcattaatttctcagatattacgatcaagtccaatctcgctcaggctctcaattatcattaataacatacataacaaaacaggctgccgaatcactccggcggcctgtttttatacaaacaacaatgaaatgagccagcttgcgccgaataacagaagcacgagcaggaaaaagcaccagtcggcgcggcgcacggtaacagttctgtaaaacgtgcggtttcggctccccgtaaagcctttagattccatcgcgatcgccgtgcgttccgcctttctgattgcgcctgccaatagcggaatggtgaagcgcctgaaggcggagagctttcctttcagcccggaatcagaccccgcgcccctgattctgtgcgcctgccggatgatcaggatttcatctttcagaagagggagaaaccggaaccccgcgataacgccgtatgcaagcttgggcggcagcttacactgctgaatcagactgagcatgaacagaatcggatcggttgtgaaaagaaacatcatcgacaaagcggaaaaacataaaatacgaaacgcgatagaaatcccgagcgccgcgttatcactgttgacggcaatcggcccgagcttaaacagcaggttgcttccggttgtcgggacgtttccgaatacggcggctgtccataaagaaccgaaggccagaatgacaaacggaatcgtgaacagcagccattttttcagcggcacacgccccgccgagaggacgcctcccgcaatgatgatataaaacaaagcaggggtgtacggattataaataaacgacagcataatgacgcataacaatacagccgccgcctttattgacgggttaacagcctccagccgcaagttcatttctccgcctcctgtcgtgtttcatccattcataccgcagcggtaaagccaaatgcgcctgctcggcgatcccggtgttatcagaaaataaagcatcgggagttccccggaataccagtttcgtgccgcagagcacaaggatcgtgtcggcataatctgagacgagttccatatcgtgtgtcaccatcaaaacagccgttccttccttttgaatctcacggagcatttgcatacactcccgcgccgttttggcatcctgtccgaaagtcggttcatcaagcatcaaaacgttcacattgtgcataagcatcgttgcgacgctgagccggcgtttttgtccttggcttaaagaaaacggatgctgtgaggcatggcgtctcaggccgaatcgggttaacagctgaagagctttctcctttgcggctctgctgctttcaaagccgaacatcagctcttgaatgacggaatctgtgacaaactggtgttcaggattttggaaaacatatccgatcagccgccgcagctctttttcagaataggaatcaatcggtctgccgtctattttgatgtctccgcccagcggacggatgagcttggccgcggcagaaaggagcgttgtttttcctgttccgttagggccggcaatcgcggtgattgaacctttttttacggaaaagctcacatcctgaaaaatgacgtctgctcctcttgagaatgacagcccgtgaacgctcagcgcgtcttctgccgaaagcgcggcgggccggggttcgggcagagacggtacagattcttgaaacagcttttctttacacaatgtaaaaggaatgctgacgtgctcctgcaatgagatcacacgcggaatcggaatgccgagctgcatcagctcttcaatctttgtttcaaagataacgtccgtctctccgtccatcaccttctgacccgtttcgtcaaggacaatcgtcctgtccatccacggagcccaatgatcaagctgatgttcgataacgagaaggccgaagcctttttttgcttgaagatctttgatcagccgcactaattcacgtgcggaatatggatcaagctgtgccgtcggttcgtccaaaataatgagttccggttccatcgcaatgatacaggcaagcgccactttttgttttgaaccgcctgacagcgaagcgatcgttcgcattttcagatgagtgatctccaattttgccaaaacatcatcgatgattgcgtccatatcttcttttgtatattgcaaattttccaggccgaaggcgatttcatcttcaaccgtcagcatgcaaaactgctggtccggatcttgaaacacgacgccgatggatctggcggcgggctctgtcagatgtgaaagaggtgttccgtataaagaaacggttcccgattgaaccccatcgcatgcttccgggtacagaccgtttaaacagagagcgagcgagcttttgccgcatccgctcggcccgagcaataaagcccgctctcctttgcggagctgaaaggacacgttttgaagaatcggcttttcatcctgatcataagaaaaggtaagacggccggccgatagaaggggctcagatgcctgcatcttggttcacctgtttctttttcttcttgaattgttttccgagcgccatgccgttcagcacccctgtgtaagccagcgcatcactgattgctttgccgagaaggccggcaagaagcgcacctgagaccagacggatgagaagcatgacggctaataaacccggattcaaaacagagtatccggaaacgaacaagtcataaatgaagctcgtcacagaagaacccataccggataaaagaagcacgggcagggtatacatccgccagcgtgtcgcaaaaaagaccgcttccgcaccgattccctgtgcgatcccgatcagaatcaccatcggtcctgacggatttccgagtaagcactccacaaacgcggcgatgatttcagaaacgagagccgctcccggtttttgaataatgtacgcggcaatcaccgagacgataaaccagataccgtaaatcggttcgtagctcatccggccgaaaaatcctgccgctatattgcttgcatgagttgatactaaataaatgacagcaaatacaacactgatgacggacatgacgacaatttctctcattttccaatttttcattgtgatctcctgctttcttatcggatagtcgtatgtatgaaagagatgattttacaggcggttcatattcagtttcatattgcggtgtcctcccccgttttttaatgaaaaataaaaaactgcatatccgagggaatatgcagcagcagaacgaaaacgcatggggaaaaaccctgcgctccggtcaatctgcacttccccacgctggtattatccagatcgggttataagggatcaaaacatgcctgccgcatgttttatctcagccgataacagcacccctagtgcgtttcctatacagttttttatgatgacatcatcatagttgatcatgtctgatttgtaaacagcctttcttcaaacagagtttggaatcggaccggatgatcattcataaagataagtagagcccttttgatcaaaaggaaacggaggacatctatgtttgttcatacagtgcagtctggtgactcgttattttccatcagcagaaagtacggataccctgttgacagcatcagaagcgtcaatgggcttgaggaaacgaatatcgttccggggcaggcgcttttaatccctcttaatgaatatacggttcagccgaatgatacgtatgccgttatcgcaggtaaggcttatgtgccgcagatgcagctgatgcaggcaaacccggatattccgccgaaccggctgcgggcgggtatgaaagtgaagatccctgatatctctaactatcttgcgggaaccctgcaattttatgtcattcggacgcctgaagcggatagagagctaattaatgattttgcgccgtattcttcggcgatttctttgtttgaatatcattttggcccgaacggagatatcattaacgatttaaacgacagaaccgcaatagaaaccacatggcagaacagagtgcgcccgcttgccgtcattacgaatctgacagaagggggattcagtccggaattagcccatcaagtgctgcaaaatccgacggcaagaacgaatctcgtcaacaatatcgtctccttaaccgtaagaaagggatacggcggtgtaaatattgattttgaacgggtcagagaagctgacagggacctcttcacaggatttctccggcagttaaaaacccggctttcagagcatcagctcgcgttaacgatatcggttccggcgaaaacaagtgatgcagtgccgtggctgaggggatatgattacggcggaatcggagccgtcgtcgattatatgttcattatggcgtacgactggcaccacgccggcagtgagccgggacccgtggcgcctttgacagaggtcaggcaaacgatcaattttgccatcagcagggtgccgagaagaaaagtgattctcggtgttccgctatacgggtatgattgggtgattccgtaccgtccgggaacgatcggatccgccatctccaatcagcgcgccatggaaacggccatgaagcatcaatcagtgatccgttattcccagcaggagcgttccccttacttccggtatactgatgaaaatggaagaacgcatgaagtgtggtttgaggatgtgcggagcatgagtgaaaaaatggttctcgttcgggagttcggactgcaggcgatcggcgcgtggcaattaacgctcggtttcaaaccgggcccgtggctgcttaggaactttttcacgatccgaaaaatatagctgcatgtcccgctccgcaagtaattttttttcctatgataacggatcttcttttggacaatctaaaattgaacaggaggtctgtcatatgaagaaaagggaagagcagtatatcaacgaggctgagtatgtaccgcatccgacaaaagaaggggagtacgcgctcatgctgcatgaatcctatcatttcctttcagaagaggatgaaagcgatttgccggaataagggctttatgcctttattccgtttattttataggcatgtgctgaaatcacaaatttaaggttgacacattccttttttttctgtaatctcagtgtgtcaattcaaataagaacttcgttaggtgaggctcctgtatggagatacgctgctgcccaaaaatgtccaaagacgccaatgggtcaacaggaatcatcgacataaggtgattcttaacgcagctggatggctgtcctatgccatacagtgctaaagctctacgattggaggccccgcacgtttatttgccgtgcttgttttcgccttcatatcagaaggttttttttatgcctcaaaacgtacacgactgagcatgataaggaggtgcggagtatggattctccccattcgagtatgtcagaagaagtacccatatacagccagataaccagtgacgacatgatgaggagacaaaccgccgcacttcccttgacggacggcgcgtctccgtaaaggaggtacgagtcccgatggtccaaaacatgacctatgacgaactcatattacgcattatcattttattgcgggacggaaaaataaaagaattccgaaacatgatagatgagcttcagccctatgacatggcatttttgtttaaagaaatgccggaaaagcaccgggcccgctatctgtcatatatgacggttgatgacatcaccgacatgatcggagagctggagcgggaatttcagcttgccgttttgcataaagtcggtaaaacgaaagccactctcgcaatgaataaaatggataacgacgatctcgccgcattgctggaagagatggatgaagaactgaaagaacagcttttatccagcatggaggctgaggaatcaaaggccgtgcagcttttgatgaactatccgcaagaatcggcgggacggatgatgacgaaccgcttcgtctggattccgcagcattatacagtaaaagatgcggttgtgaagctgaaaagctttgcagaaatcgcagaatcaataaattatttgtacgtaattaatgacagcaagcagcttgtcggagtgctctcttacagagatttaattctcggcgagcctgaggataaagtgcaggatctcatgtttacgcgtgtcatctcggccggggtgctccaagaccaggaagaagtcgcccggctgatccagcggtatgactttttagccattccgatcgtggaagaaaatcatgtgcttgtcggtattgtcactgtcgatgatattattgacgtcgtgattaaagaagccgatgaagattacgaaaaattcgcagcctccggtaaggcgattacatttgatacgaaagcgtacgttgcggcgtaccgccgtttgccgtggctcattctgcttttgtttatcggattgatttccggaagcattctgaattattttgaagatacattgcaaaaagtcgtcgccctcgcgtttttcatgccgatgattgcgggaacgacgggtaatacaggcacacagtcactcgccgtcgtcatcagaggactggctaaagaagaaatgaataaaaaaaccatctttaaactgattttccgtgaattaagaaccggtatctatatcggcatcgtctgtgcgatcgcgattacgattgtcgcaaccgtctggcagaaagacttaacgctcggttttgtcgtcggttcatcgctgcttgcaacgttgattatcggtacgatggccggaacgatcgtccctattattcttcataaactgaacattgacccggcgattgcatcaggaccgctgattacgacgctgaacgatattttgtccttattaatttatttcggcattgcaactgcatttcttcatgctttataaaaaaagtccgtctcacaggaggcggacttttttgatcagcggtttttatacttaaaatgagcattaagctgtccttccagcatttttttgcggagctgcgggtcgtttttgagagcctgttctttttttcgcatgtcttttaaaatttcagccgtctgcacgccgtcttcccgcttgttggcaatatccatcagccgctcaacgtccgcgaaggaatactttctcgttccccgtgatgaacgctgcggatagattaatttccgttcttcatagtatctgatctgtctgactgacaatccggttaattcgcttacaatgccgatcgagattacttttttatctttgtaagattgttcgtctgtcgtcatttttccacccctggatgtcttttactcatattatataagaaaaaaagagaaaaaacctgacgcttgtcaggttttctgacgcggaatagaaaattttagaaaaaaagcggcagaaaaattgacaaggttaatgcatggttctgtgccccgttttatgcttactgtacagacacaatgaggaggaaggataggaatggagaaagaaaaagcggtttcgctggcaaaagaaatcattgaattagatatgaaacgcgatgaaatgctggaggcgttcatgcagcttgccggggaacacgcttttccgctgctcagagccgtccagaacggactttaccgaaaaacatcataatctacagaagttttacaatggctttatacgtctttgatataaaagcgttattctgatcatagaataacggaaaacaaaggaggccgctatgagtcgtttgcttcaaaatgcattggacaaagagagaaaccattattccaaaaagcttctgcagatcggagtctatacgaaagaaatactcaattccatgacaattacggagctgagaaaggaatacgcgtatttttttcggaacattccctataaagaacggaacccttatacaaattaaatgatgtataagggtatttttttatataaaaaagaaggaattctgaaaaacggcacgaatagaatataaaacaaagaacgactcttatgaattgtaagggtttacattatttttttataaaaatcttaaatacggggtagatatgatgagattatcatttaacgaagaagaagtgatgcgttcgatgaatttgtacaaagtttttgcaagggctttcaaaagtgtgtctgaacacagcatccgcgacagtaaagaacatggttttaatccgactgaatttgccgttttggagctgctctatacgagaggtccgcaaaagcttcagcaaatcgggtcgcgtcttttgcttgtcagcgggaatgtcacctatgtcatcgacaagcttgaaagaaacgggtttttggtcagagaacaagaccctaaggacaaacggtctgtttacgcccatttaactgataaaggaaacgagtatttggataaaatttatccgattcattcattgagaattgcgagagcgttttcaggacttatgcctgaggaacaggaacagctgatagccttactgaaaaaagcgggaattcacagccagcatttgcttttccgttaaaagaaagcggatacagacactcttcttcacgaagagtgtttttttctgttccggacagtagagcctgaagcggtttttgcataagctgatacaggtcggcatcattatttaccaatcataatgtgacatgccccatgccaaaatatgagggtgctttgaatataaagaaggtgaacatgtgagaagctgtctgctgtctatatggtacttacttgatccgctttatttcttctttacccggctgacgctgattgataaacggcaatcgaatgtattccgcgtccgtttgactagatataaaggaaaagaagtcatcctgagcgacggaaccagaattaaaaaaaacgacgtgttagttaagattcatcttcataatgtcaaactcctgaaagagctgcagcctattgaaagcgcggtcagaagggggattatgctatatcagaaggtatatcaatccatgcctcatttagcggattatattaaccagcataaacggaaagacgagattaagggagtcgtcggcattacaatgcttcataaaggagctgcgagactcggttttgatgtgataaaaccgtccagcggttgctacaggctgtttaagaaagcggcccatattccgattttatactttactgcaaaacagctcaccctcaaaaacattccttactcctgctatttatttatttccaaagaaaaattgatgtgcacgtatcagactgaaaagagctgacaaaaagcgtcagctctttctcttgatttgctcaagcacgattgaaagcgggccgtcctgcggattccggtaaaaatcataaaacggatctccctctgtcctgacgcggttcactactgtatcgatcgtataatcatcaggtgttaaagaggagttgacttcgctccaataaaggggagctgcaaccgttcccaattcgttgccccgggtcgaatagggggcgataatggttttcccttcggcatgctgcaagtaatctaggtagagcctgccgtttcggtttttgataaaccgctctgtcgtaaaaagatccggccgcgtcctgacgcaataatcggcgatgagcattgtgaacgcacgggtttcttcataggtgaatgcttccggtgaaagcgggatgtagagctgaatgcctttatttccggagagcttcgggaatgacgtaatgcttaatgagtcaaacagctgtttcagcacatgcgcagcctccactgccataggaaaatcattccttgacggaggatcaagatcaatgacgatttctgcgggcctttcagaatgcactgtctgaaacggaacgtgaaattcaagcgccagctgattggccagccatagaagtgacggtatgctgctgcatacgatgtgctcgtggctcccgtcaaacacgcttgagacaaagtccggcgtgtagtccggtttgtttttttgaaaaaaagattcgccaggcgcgccgtgcggataacggatcaccgtgacggcccgatctttaagaaagggcataagaaaatcgctcattttcaccatataactaaggaaatctgctttcgttttttcacgttttttaaaaacaatcttatccaggcttgtgaactgcagcttcggcggcagcgttttagagtgaaggataagctgctgatacgtgcattccgtccaatccatttcaaactgaaaagacacaaaagatacttcacgcagcgtgtcctgcaatatggttaaatactgcacggtcatgcagatagaaggctcaagtgtatactcgccgcttttttgtttttttccgtgggtctccataatggttctgacggcgtttttttcttccgcctgcatgccgtgggaaacggaagcgatcgggacggcggtgccgtcttttaaaacagaggccgttacatacccgttcttcggattaaacccggttaatagcacatgtgccgttttcatatgtttatacttttgccagtcgggggagcgtttattttccgcccagccgctggaagccctttttgctacgataccttctccgtcatggcggacgaccttgtcccaaagcgcatcaaagtcagtgtgttccggaatgtattgaatcgcttcttccgctaagtgatgagggcaggctggaagatttgcttctttaagcagtttggaaagggcgcgtttccgtttcacatacggtaatgaaacggtgcccgcgccttccagaacgaggagatcaaatgccagaaagcggcacggccgtctatcagcggtgctttcaattgcttccgtccgttttaaacgtccgcggatttgaagatgctcaaagtccgctctgtacggattgattaaatagacaagctctccgtcaagcgtaatggggaacctgtctttcatgtgctgaaaacaccgagccgcaaaagctgtgatttccggaaattgattcgtcagcgtctgtccgtttctgctggttaatgtaacgccgctttcgtctatgcggagaagacagcggaacccgtcatactttacctcatagcgccactcactgccttcaggcggtacagaggtcaaaatcggctgcatcgtcagcaccatgattaagacgttccggctttttgtctggtcgtcttctgctttttgcctccgccgcctgctgacgcggcgtcttttggccgcgccggtgcagcctgttcgcgatccggccgcttcgtccggtcaatgcttgcctgaagcgcgctgacaagatcgatgacatcttcgcgcgggccggcagcagccggtgtcacgcccgcttcttcatgttcgagcttatcgttaattttagcgagaagggctttccggtatgtgtcttcgtattgttccgggtcaaactcggttgtcagctcattaattaacgtaatcgccgtctgcagctctttttcattaacggctgtctgctcgggaacgcccggcacatgtccggcatttctgacttcatccggataatgaatggattccatcacgatgcagttgtcatacacgcgaagaatcgcaagctgctgtttagagcggatcgtaatggaggcaatcccgattttacccgtcgtcctcagcgcttcccgcagaagtgtataggcttttgtgccgttatctcccggcccgacataatatgaccggttaaaataaatcggatcaatttcctgcagctggacaaagtcaacaatctcaaccgctttttcttcatgttcctgttttacgtctttcaagtcttcgtctgtcataatgacgtatttcccttttacatactcatagcctttcacgatttcatcaggttccagacttttttcacatccggtgcagattttctcgtatttaatcggcgcatggtcttctttatgaagactgcggaattttatatctttatcttcagtggccgcaaagagcttgaccgggatattgacgaggccgaaactgatcgaacccttccacatcgtgtgcatgaataaaaactcctttttgtctttattgtggataaacgggtccgttccatgtgtagcaacttatgggtgttgcggcgcttcatggagcggctgttccatttcctcaggcggaaatggtcggctgaaaaggaaatgaattctttatttacaatcagtgaatcagtaagttctttaaagcgctgaagtccctgaaaatcatcagcggtaatcaaaaagattatacaaaatcattccccgggaaatgcccacgcattcccatgtggtgactgagaaaatttcccgctcccatatgaactgaatccgcggtcagccgccgcttacttttcgggagatcttaagtgatgtaaacgccgccagacaagcaatcaggagacaggcgggacgttgtattgcgcatgtcattccctcccgctataccgatctgaaacgactcacatttataacgggcatgtctaaaagatatttcagcctcaaggttttgtgttaaaatcattcttaagtttcggaatatagacgtaagccgggagtgatagatcatcgaagatttcatcatatcaataatagaggcgtttaaaagcttatcttatgccggaatttttttggcgctcagtatagaattcatcccggcggaaattgttcttccgcttgcgggctattgggtctcaaaaggggatatgacacttgccgggaccgtgtttgccggttcgctcggcggtgtttcaggtccgcttgtcttatatggaatcggcaggctgggcggtcggccgtttttgctgaaatatggaaagtatatatggataaaacccgaatccctgcagaaatcagatgatttctttcagaagcacggaggtttggtcgcgttcagcggccgttttataccgggggtcaggacgctgatttctttgccgtgcggcatagcgaagatgaatgtctgggtgttctctctatatacatatgcagcgatgctgccgattacatttgcttacgtatacctcggaatgaaactcggggaaaattggaaaagcgtcggttccattctcgatcaatatatgctgccgctcggtatattcattgtgttgcttctcattctttggatgtttttaaagagaagaaaacagcgggccaaaacagaaaaaatttctcaatttgttaaaaaagttaagcgttgacaaatgatgaaacaggctttatcatgagcgtataaacaaatatttcttgaaatcccaaaggggagtagcgtccggatattccggaaacaaagtcgtcaattcatggatcatatccatcggctttgttggcatgccaatcattcatgtctagcaagacctttgccttatatcggcaaaggtcttttttgcgtaaaaaaccgccggtataagctcggatgatagaaaaaagaaacggagggaatggattggactttgcattattattggagtatggatgggttcttctcgttttaatcgggctggaagggattttggcggcggataacgcgctggtgatggctgtgatggtgaagcatcttcctgaaaaacaaaggaagaaggctttattttacggattggcgggcgcatttattttgcgtttcgggtcgctgttcgccatttcttttctggtgaatgtttggcaggtccaggccgtcggcgctttatatctgttttacattgcggtcagccatttgctgaagcggtatgtatttaaagataacgccggtcagaaaacgcagaaagaaagcgggttttggcagactgtcttgaaagtggagctcgcggacatcgcttttgccgttgattccattttagcggcggtcgcgcttgccgtaacgctcccgggaactcagcttcctgccatcggcggcttggacggcggtcagtttctcgttattttagccggcggcgtaatcggtttaatcattatgcgttttgcggcatcaatgttcgtatccttactgaaaaccaggccgggccttgaaacggcggcatttgtgattgtcggatgggtaggcgtgaagctcgctctttatacattggcccatgaggaactcggtataattccggcagatatcatccattcggcggcctggaaaatcattttctgggcggttctggctgccattgcggtttgcggatggtttatgtcaggagcaaaacaaatagagtctggcgcggaatcggaaaaaagagaacacgcgtaaaatgatcaaaaagggagtctggctttttaaaaagcaggttcccttttttgtttgaaacgcttacatttaagacatatgataacaattttataacagcattgttacaaaaaacacagagaaaacccccttaattctgcatgggggcacgaaatcatgtatagtacgtcttattggcttgtcataattgagacaaatgaaatcgatttctctttttcttcctttgcgaatccctactaaattagctatgattatgagtagttatagggaggaactgaggtgaaaccagtgcttagccttttgtttaaattgggaaaaaagaagcaaacgcttgaaacatctgttgaaaaaatacaaaaaggcgacaaagatctgcagaacgatttaatacagcaatataagccttttatcgcgaagacggtttcatccgtttgtaaacgatatatagatgaaaaagacgacgaattcagcatcgggctgatcgcgtttaacgaagccattgaaaaatattcggctgaaaaaggtaattcgctgcttgcatttgcagagctgattataaaaagaaaagtgatagactatatcagaaaagaagcaagaaccgctcagcatatcaatatggatgtgcaggaaggcgacgaccaggaatcttcgcagagccttatcgaagcggagctttccattgatgaataccgcaaacagatagaacaggaacagcgccgggaagaaattcttttttttcagaagcagctgaaagaatacggcctgtcttttaaagagctgctggaacaatcgccgaagcatacagatgcgaggcagaatgcgattaaggttgcctacacgcttgttgaaaatgaagagctggcgtccattttgcaccagaaaaaacagcttcctgtcaaacagctggagcagctcgtgtcggtcagcagaaaaacgatcgaacggaaccgaaaatatatcatcgccatgagtattattattaccggtgattatatttatttaaaagattatcttaaaggggtgttgcactcatgagaagagggatcatagtagagaaaaataaaaaattcgtcacgttgctaacccctgacggacaatttttaaaaacaaaaaatgatcaccgcacttgtgaaatcggagaggaaattacgttcgaaggcgaaacgcgtatgggaagaagggccagcttttttgattttctgaaactgcgcccttttaaattgggagtgtttacgatgactgctattattttgtttattttaattttgctcccggttttttctgataacaaagcttacgcgtatatgacgcttgacattaatcccagcattgaaatggctttaaacagcaaatatgaagtcattgaactgacaccgctgaaccatgacgccaaacaggtcatcagtgacatcggagattggaaaagcagcgattttaaggaagtcatcagtaatattattaccgattgcagcaagcatggatatgtaaaggaatcaaaagagattttaatttccacggtttatgaaaatacagatgacaatacatataaaaaaggcgttaaaaaacagctggctgacatgactgaaaaatataagggcacctaccaggtccaatcgcttgaatctgatatggaaacaagagaaaaagcaaaacaggaagggatgtcaacaggcagctacataagaagaaacgaaaagaaaacagaagaaaaacagcctgaaaagcaaaccgacggcaatgaaacagatcaaaaagataccgaaacagacgctgatcaaagcgagcagccggacacagacaagccggcggctgatgaaaagacagctcctgatgaagaaaaggcagcagagaagccgggaaacaatgaaacaacgcccggtacggaagaagcgaagccggacagtcaggacggcaatcagcaaaccgaaaaaaatgcagcttccggatcagaggaaaacacacagaaggaacaagatggggaaacagagcagcccccaacacaaaatcctcaggaaaacggaaatgacaaagagcctaagcaaaagtattacaatcattactggaaccatgatcgcaatgaacattgggaatcctatcggcatcatgaagattcgtcagaccgaaggaatccgaacggctaccggcacggaaaggagaatgccgataaatatcaaaattcgccgagaagtcccggcgaataagctgcattattgatttttcccgtttaattgtgattgagcctgctgtacaagacgttttgtcatttccccgcctacagagccgtttgcgcgtgctgctgtatcagagctaaggttcacgccgaattcttgagccacttcgtatttaaattggtcaagtgcctgctcagcccctggaactaagagtttatttctgctcgccatctttttcatctccttttctctggcaagatgtgttttcgcattttagtttcaaacggaacggtattgattatgctggcaattgttgtacagcaaaaaaaccccggcgcagacaccggggcgaagaagcgttatgaattataataaatggctggtcattttgtaggctgaggcttgaatatggaaagtcaaaacggagagcaccgtgacggcgattatggatctgatattgttccattgtccgcttccgagttctttaaagcagcctttgagcttgtccgtctgctcttcgacgagctcctgcaggctcgtttccttcatcggcgggtttgccttatgatgaagataatcaatcacttgggcgcagctttcatagtagctgatcgggctgatgacgtcgtctgatctgtctgtgatcgtgttaaaagcgatttttaatatgccgcgtatatgttcgaagtcataaattgattttaaatcacgtacaatgagaaggatgacagcttgttcaattgtatattttttgccgagtaaggggtggccgattaaatctttaatatcgcgcttcacccagttttggacggcggttgattttaaagacgtcagctcgcacagatttcccagctcgacaatctcgttagttgaaagcccgtattcctttttctctttttttcgttcgaatctcgtcagaaattcagggatatgcagacggctttccgcttcatccaaggtcatatccgctgattgcaataagatttggagaggggttgcgtctccttggccttttagcgcgtaaagaagccggaccatatcagttcgggtcagtttaaacgtgttcatggttcacctctgattgattacgtgttcactttttaatatcactgagaattacattaacatcatacgtcgaaattgttgcattttcaaacagatcatttataatttaagtaaataagttcttttgatcttaaaaaagacggaggtaattatggcgaaaagaatatttctgtttattttaacgaaccttttggtcattacgacaatcggaattgtgcttacgattattacaagcgttaccggtgtcggctcgtatatacaaaatggccgcattgatctgatggcattgctcgtgttcagtcttgtcgtcggttttgtcggttcttttatttctctcggaatgtccagatggatggccaaaacgatgatgggcgtccgggtgttaaatccgaagaaacagtcgctcaactatgaagaacagcaattggttgaccgtgtgcacagattgtcccgtgccgcagggatgacgaaaatgcctgaagtcggcatttatcattccccggaggtcaatgcttttgcgaccggaccttctaagcgccgttcgcttgtcgcggtttcttcaggtttattgcagcagatggatgatgctgcggtggaaggggttcttgcccatgaagtcgcacacatcacaaacggtgatatggtcacgatgacgctgctgcagggaatcgtcaatacgttcgttgtattcctttcccgaatcgcggcatgggttgcaagccgctttgtcaaagaagacctcgcgccggtcgttcattttatcgcgatgatcgtgtttcagattatcttttccattctcggcagtcttgtcgtcttcgcttactcgcgccatagagagtttcacgctgaccgcggcggtgcagaccttgccggcaaggataaaatgattcacgccctgcgtacgctgaagtcttatacaggacatgtgaatgaagaggaccagacggcggtgcagacgttaaaaattaacggtaaaaagcattcgtcactgttctccacacaccctgatctcgatgagcgcatccgcaggctggaagcaaaataatcaacaaaacctctgacaatcgtttcagaggttttttgtttaaagatcggcaaattacataaggtaatgaaaaatctttctaaaaagacctttaaaaattctcccaatatcattagaataattacgtactacatttgagaggcagaaggaactatcttatgaaattaaaactgaagaaattcatacagatcttgtcgcctgcacagctgattgcattatattattttctcgctgtgacggtggcatttattttgctaagtctgccggccgcccacaaacaaggggccagctggtcgtttatagacgcgctgtttacggctgtcagctcagtcagtgtcaccggtttaacggtcgtcaacacggctgatacattcagcacggccgggattgtcattttggctttcgtgcttcaattcggcggaatcggcatcatgacgctcggaacattcgtctggctcattatgggcaaacggatcggtctgcgggaacggaagctcatcatggtggatcagaatcaatcgcagttttccggtatcgtcaacctgatgaagcaagtgctgtttttgattttattaatcgagtttttaggcggcatcatcttaggaacatattttttaacgtattatgattcgtttgaacaggcgtacttgcacggattctttgcgagcgtcagtgccacgacaaacggtggttttgatattacgggaaattcactcgtcccgttcagacatgactatttcgtgcagtttattacgatgcttctgattattttcggtgcgatcggttttccagtgctcgtagaagtaaaggactttttgttttcaaaacagcgcagatactcattcacgctgtttacgaaaattacgaccgttacgttcggaatgctcgttttgttcggagccgtgggcatttatgcgcttgaagcaagccatgtcatgaaggggaaaagctggcatgatgttttatttttatgtctctttcaatcaaccgctacgcgaagcggcgggcttgcgacaattgatatcagccagctgtcggcgccgacattatttttcatctgcgccctcatgttcatcggcgcatcaccgagctcggtcggcggcggaatccgtacgacgacgtttgcgcttaaccttcttgccctgtttcattttgcccggggaaataaagcggtcaaggtctttaaacgcgagcttcaccaggctgatgtcatgaagtcgctggtcgttacgatgatggcgattctgctcgtgttcggatcgacgctgattctggccgtgaccgagaaaaatcagacgctcctcggactgctttttgaagtgtgttccgcattcggaacgaccggcctgtcgcttgggattactccgcatttaagcgacatcggaaaatgcgtcatcatgattgtcatgtttatcggccggatcggcattttgacgttcctttatctgatcggccgaaaagaaatcgaagcaaattatcactatccgaaggaaagaatgattatcggctgacaccgcttttcagaaagcggtgttttttattgccgtaaaatggatgagtggaaacagtttctttggagattctacttgtaaagaggtgacgtcattgtttaccgtattttggaagtcggtagttatgatagcggtcggtacctttttattgcggattgccggacggaaatcaatcagccagctgtcggtgacccagacagtcatcatgatttcgatcggctcgattattattcagccgtttattgaacataatttatgggaaactattttcgcggcggcgatttttattgcggtattaatcctgatggaatatttagaaatcaaatcaagcttttttgagtttttattttcaggaaaaaccgtcgccgttgtcagaaacggaaaaatcatcccggaaaacttaaaaaaaatgcgttttaccgaagctcagctgtcaatgaggatcaggcaggaaggcctcggagacattcaagattttaaatatgtgctgcttgagccgaacggacagatcggctatgaactcattgatgaggccaaaaacgtgacagtgcgcgacttgaaaaaaatgcttgatgaattcaaaacagatttgctgacagaaggaggaaatcaaatgaaacgcaaagcagcaaagaatgaagctttgacgaacaacaacacaccgactgagagcatggacaaagatgcatacaaaacacaatatgacggtgatcccggactgagaggcgcaaaccgcaaatcaaaacacggcaaacaaggaggcgagtaacatgacgaaaaaaaaccgccacagcaaagacatgcaaaaccataaaaagccgatggaccctaaattgcttgaagaagagtttgcaagcgagctcggtgattataacgccggaaaatggattgaaacgcttgaacagacgaagccaaagaaaaaagaagacggcaaacaataaaaaatacctcttaggcgataacgcttaagaggtattttgcattatttcgaataagcaccgtttcttgttcctttcaccgcttcaagccagccggtgatccgcagctcaataaacggctgtgcggccgttttcaccgcattgctggagagaatggacgtaagagcggccgttaaaattaagagcatgactaaattctgataatcagacaagtgatcttcaagcccgatctgccgcagcgtttttataatgaatccatgcagcagatacacgtaaaacgttctcgtcccccatttcgtaaagaaataacgcttttgcggaacgagcgccaaaaagctgaaagtggcggcaaaggccaaaacataccagccgatgcgcgacagaccgctcaacagcgacactgtgccgaatgtagaataaggctccgatccgaacagccacgagtaatcaaagtcaatacaccagcataagaggaaaacaatccccagtacgcccgcggcaatctgtctgcctcttttagcccgaagcaaatcaaagtgctgtttctttaaataaaacccgacgagaaacatcggaagaaaaacaaacgtccgtgaaagactcagcgtgctgctgataaaatcaagatacccgatcatgacggcaagcccgcagctcgccccaagcgcccacattttcggcagcttcgtaaagggataaagcagcagattccaaaagaataagctgactaaaaaccagagagaccactgcggatcaatcggattgacgcttgccatgctttcatcctgaatcaaatagtaaaaaactgagtaaatgccctgaaaaatcaagtacggaataatcagcttcacagccagcttcttcacataacctttccgcttaaagttttttgcgaaatagccggaaaccaggataaaggccggcatatgaaaagtataaatgaatttgtagagatggagcataaactcatttccgttaataaatgaccggaggatatggccgaacaccaccagaaaaatcaagataaacttggcgttgtcaaagtaactgtctcgcgattttgtcatagcatcaccttctcttcaaaaatcatccactgcatgattatttcctgttggtgttcattttaaaataaaaaacaaaaaattgaaggaggacaaaagggattgttaggatgatgtaatggggaggtaaggatcgtagaaaaagactttaacttgtcatatcattgaaattttctgaaatgtatagggcgaatgaaggaagatgaggtattttgtagaaatattgaaggataggtttttgaagaaggagtgtactgaatggctgaaactctggatttgcaaacaaacgagtcgctgaaagagcatctgaagcggatgaaagaggaaaatgaccgcctgaagagtgatttgaaccggtatcatgtgattatgaataacacgcttgatgccatttttatatgccgtaaggaaatgaaaatcgtccaggcgaacgaggctgcggcccggatgatgcagattgaggcagagagcctcattaaccgctccgtcctggattttttatattccgtgcctcaggaagaactgaataaggccgtgaaaaagtttttaaaaaaaggccatctgtggaaagaggtgccgattaagcttgacagcggcgcgacgaaatacattgaattcctcgccagagacggaattggggaggattatttttttgtggtgatgagggacatctcctctaaaaaaatattagagcgcgaattctccatgaacgagcagctgtttaaagatttgtttgacagggctgtcgacggcatcgtgctgtttgataaggacggcgggtttattgatgcgaacctctctttttgcaaaagctttgagatcggccagaatgaattgtcccatctgtcgctccgccattttaccgacggagaaaacaaaaagcatctgaaagaaatctgggaaaccctccgcagaaaaggaaacgccaaaggagaactgcccgtcaagcttcggtcgggcgaagagaagctgtttgaatttacgattacgtccaacttaatcagcgggttctacatgtccattatgagggacataacagagaaacggttgatggaattgaaacttttcaaaagcgaagagcgattccgcgaaatttttgaaaacgccatggacgcgattgtcatttggtctgatgacggaaagattgccaaagcaaacgaatcggcgtgccgcattttcgaactgccgatggataaactggtggagacgaatttatgtacgtttatcgttgatccgcagaaaaaatacaaacagattaagaaaaaatatgaaaaatacggggaaatccgtgaagaaatgctgtttcagatggcaaacggccaatttaaagagctggaattcacatcaaaacgaaccatacttgaaggtcagcatttaaccattttaagaaatgtcagcgatcgtaagcggatggaaaaggaattgcgggaaagcgagctgaaattcagaaaagtattcaacggctcaatggacggcaaggtcttatttgacaaccaattccgcattattgacgcgaatcctctcgcaagccgtatactcggtatgccggatgaggagctgagagcgtacaccgttccggatattctttctttatttgatattgaaaacgcgggtgttcccgccagaaagattgatttagaaggaatggataatgaaatccccttcctgttaagcagcagcgacagccgcaaactggaattctccttcaaaagaaatatcattcaaaatatgaatctggccatctttaaagatgtcacagaggccaaagagcttgaagagaggctgcggaaatccgacactcttcatgttgtaggggagctggcggcgggcatcgcccacgaaatcagaaacccgatgacggcgctgaaagggttcattcagcttcttcaaggaagcattgaaggcgaatattctctgtactttaacgtcattacctcagaattaaaacgaatcgagtctatcatcactgaatttttaattttagcgaaaccccaggcgatattatatgaagaaaaagacgtgacgcagattatgaaagacacggctgatcttttgaatgcccaggccaatcttgtcaatgtgcagatccatctgaacctgaccggaaacatcccgccgatttactgtgaaccgaatcaattaaaacaggtgtttatcaatattttaaaaaacgccattgaagtcatgccgggcggcggcaatatctacgtgaccattcagtcttctgatcaagaccacattttgatttctattcaagatgaaggaacaggcatttccgaagacaaattaaaacgtctgggtgaaccattttacacgacaaaagacaggggaacgggcctcggtctcatggtcagctataaaatcatcgaagaacatcagggacgcattcatgtggaaagtgaagaagggaagggcaccgtttttcatttgacgcttccgatccggcagaataccgaagaaagaaggagcggggaatgatctgttttacaagtgtgagagcgccgtttggaaccgtcatcataacagaggaagagagctttattaccggcctgtttctcaccggggaagattttgaggaatggcggaaagacgcgcccggcgtaaagccgtgcgaaaccgctttgctgtcggaggcgaaacagcagctggcatcatatttttcaggagaaagaaagcaattctctctgcctctgagacaaaaaggcacaccctttcaggaaagggtatggaacgcgctgacgatgattccttacggggaatcccgaagctacggcgatatggctgaagcgatcggaaaaccgaaagcggtgcgcgccatcggacaagccaataaacgaaaccggctgccgattttgatcccttgccatcgggtaatcggcaaaaacagcgccttaacgggatacgcgggcacgaagacggatgtaaaagcggtgctgctgaacatcgaacaaatatcctataaagaaaaataaagcgtatggcacgttccgttttttcacgtccgacatatcattttattaagtgaaaaaagttggtctgatgaaaaaggaggacgaagcctgatgaaaatgagccgtccgcaaaagatagccggttatgcagagctgttttttaaaatgcatctcattacagccgtccaaaaagatgaagtgattacattgtgcagacaaaaaaaccgctgacattgcctgaggcaatatcatcagcggtttttcagctcagctggcagtcagtgaataattgttcaatttcttccgtgtaagagccggtcacaattcctttctcggttataatgccggaaatcaggctgcccggtgtgatgtcaaaggccggattgaagaccggcacatcttcgggagcggtgcgtatgccggagatctgtctgacttcatccggatctctctcttcaatcggaatctgatagccgttttcaatctgcaagtcaaatgtcgaaagcggtgcggccacaaaaaacggaatttgaaaggcgtttgccaaaatagcgaggccgtacgttccgattttgttggccgtatcaccgttttttgcaattctgtcagcgccgacaatgaccgcagaaatatgtttttccttcattgtatgggcggccatgctgtcggtaatgagcgtgacatcaattccgccctgcatcagctcccacgccgtcagccgtgatccttggagaacgggtcttgtttcacatgcgtagatatgaaggccgagatctttttgtttcgctaagtaaaagggagcaagcgccgtaccgtatcggcttgtggcaatcgagcccgcattgcagatggtcatgatctggtcgccttttttaaaaaggtgcagcgcattttgcccgatcattcggcatgtttcttcatcctcaatctgaatttgaatggcttcatgaacgagcgttgtcttcgcttcattgattgagatcgcatccctgatggaatccgtcagtctgtcaagcgcccacgcgaggttgacggcagtgggcctcgaactgtttaaatacgctttgacatccgcgaactgacgtcggaaatctgaaaggtcgcgggcttcaaacgacttggcggagagcgcgagtccgaacgccgcggttataccgatggccggggcaccccttactttcagcgtgacaatcgcgtcgaatacatcttcctttgtttcaagttccgcatattcagtgacgtcgggaagcttttgctgatttaaaatgcggatgtaggtttctttccattctacagaacgggggatggcaaattcattggtcatgctgcatcattcctttacacggagcttaaattggtccagaacctcggtgatatgcttcagtttttttctgttttcgatataacaggcgccgatgtcaagcgccagcttcttccgttcgattcgtttgtcaaacggagtgatttcatctaagtcagccacatgggcgagtccgatcgtgcgccggatcaattcgcatcccgcaaaaccgaccgcttcctcaaacgcgtttttcagtgtgtcttccagcaggtgtctgcgggaaggcaagcagtctttctcccatgcttcactgaatgttttcacaaatgtatcccatacggcggcagtatgatcatataacggctgtctgtcgtcaccgtcgcggctgagggcgtttaacagcagattggcgataaattggccgatgtcaaacccgatcggtccgaagaaagcaaactcggggtcaatcacctttgtttcatgttcatcggcgaagatgcttcccgtgtgcagatcgccgtgaaccaatgtttccgcggaattcagaaagatggctttcaattcgtcagcaccttctttcagccgggaattgttccaaactttttctgcgtatgggcgcagctcctcttcaaaatcgtttgtctcatggtcgagaaacggttctgtaaacacaagcctttccgtaatattgcaaagctcaggatttgtaaactgctttgcgagctgctgctttactttcgcatcaagcgcataatcggatgagtaaaacagcgttttccctaaaaattcaccgatatgggcggataagttgggataatgcttcccttccagcagcccttttcttgaaatccgcaaatgcgagaggtcttccataaccgtgacggccatttcagtatcggaatagtaaacggccggaacgaggtgcggcacgtgttcgccctggcggatgagggcgctgctttcgattctcgccctgtcaattgtaagcggccagctttcaccgacgactttcgcgtaaggaatcgcctgtttgataatcagtccttttttgttttctttatcgtaaacatgaaagacgtaatttaaattgccgtcgccgatttcacggcatgtcagagtgcttttgctttggaataagccgagcttgacggctaacgcggcggcggagctttctgttaattgttcataaagacttattttagttgctgacatggatttaccctccaattatgtagtggcagtaagagatcgtgacggagaatacgcccgaaaaaaagcctccttctctgaaagagaaggaggctgaaacagtgcagtccgcctcttatctctcagataacatctgatggaattagcaccgtgccttatgagacaatcgtctcggcgcaaaatgtacgcgccccatttcacaatggaattacggtcggttgctgttggggtcaaaaggccaatccctcgcccaactctcgataagagaaaaatatattgatttgtatcacaattcggattaatcagttgatgaaaatattagcaggtgccggatattcttgtcaacatttttttgaaaattaatataaatcacgccgcaagtcttggaaaaccggaatggttccccgcacggccgcgctttctgacacatcgatttccgcccggactgcgccttccgtccggtctccttcggctaaaatccggccccacgggtcaataatcaggctgtggccggcaaattcattatcgggattggaccccgtgcagttagaggctgcgacaaaacattggttttcaattgctctggcgataagcaggcttcgccaatgatcaaggcggggcagaggccattccgcagagataaacaggacattcgcgccctgggacgtatgctttctgatccattcggggaaacggatatcatagcagatcagtccggcgcacttgacaccgtcaagctcaaaggaaccgtcgctgtttcctgctgacaagtaaaggtgttcatccatcagctgaaacagatgggctttctgataccgcttcacgatctgtccgctgttatcggcgatgtacatggtgttatagacattttcgccttctttgaccgcaaaagatccggcaacgaggtgtacgttgtatgtttttgccgtttctttaagccattgttccgaaactttgccgttttcatccgccagctggtctagccgtgtgagatcatagccggtcgtccacaactcaggaagcacgattacatccgcatggcggctttcttgctcaatcaaagattctgcttttttaaagttttctgaaggatttccgtatgaaatatcaaattgcaaacaggaaacggtccatttcattttttaacacctcaagtttctctttactttttttatttaaccatatatgatgatggactatcatttcaagacatttttagaaggtgaaaatatgaactttgaaatctcagatgtactcaaacagctgccggaacaatttttcgcatcattggtgcaaaaagtgaatcaaaagctgaaagaaggcagagacgtcatcaatttagggcagggaaaccctgatcagccgacgcctcagcatatcgttgaagaaatgaagcgcgccgtcgaaaggccggaaaatcataaatactcatcattccggggcgcttacagcttcaaagaagcagccgctgcattttatgaaagggagtacggggtcacgcttgatccggaaacggaagtcgccgtgctgttcggaggcaaggcgggacttgttgagcttccgcaatgtcttttaaacccgggagataccattctggtgcctgatcccggatatcctgattactggtcaggcgtcgcccttgcaaaagcgagaatggaaatgatgccgctgacggaagaaagagggtttctccctgattacagcgtaattcctgaaaaggtgcggagcgaggcgaagctgctgtatctcaattatccgaataatccgaccggcgctgtggcgacagaggcgtttttcgaggagacggtcggttttgcggagcaaaacggcatttgtgtcgttcatgatttcgcgtacggagccgtcggctttgacgggcataaaccgctgagctttttgcagaccgaaggcgcaaaagagacgggaatcgaaatctataccttgtccaaaacgtataatatggcgggctggcgggtcggatttgccgtcggaaacgcttctgtcatcgaagcgatcaacctttatcaggatcatatgtttgtcagcctgtttcccgcggcgcagcaggcggcggcagccgcacttttagcggatcaggcatgcgtcgcggcgcaaaatgacagatatgaatcgagacgcaatgcatggattaaagcctgccgcgatatcggctgggatgtgacggctccggcgggctccttttttgcatggctccctgtgcctgacggttatacgtcacagtcgttttcagacctgctgctcgagaaagcggatgtcgcggtcgctgccggaaacgggttcggaaaatggggggaaggctatataagagtcggtcttctgacaagtgaagaaagacttaaagaagctgcggaaaggatcgggaaactgaatcttttcacccgaaaaagcattgacatatcaggataacaatgcgataattcaaaatactttataaaatcattattcttatcaagagcaggcagagggacgagcccgatgaagcccggcaaccgactgataaagcacggtgctaattcttgcagcaggagctgagagataagattcggacataacacgaagcctctttctgctcatacggaagaggtttttttatgttttgcgaaagaaagagaggcgttcacgcatgagcgaagtattggcaacatatcttctgacagacacaacggacagtgaaaagcgggcggaacagattgcggcggggctgacggtaggctcctggactgacctgcccctggtgaagcaggaacagctcagaaaacataaagggcgggtcgtaaaagttgaggagaaagaaggaacctcagaaaacgaaacacaatccgtcatcaccatcgcctatcccgaggcgaatttttcaagagatattccggccgtcctgacgacggtattcggaaagctgtcactggacggaaaaataaaattgactgatcttgaattttccgaagggtttaaacgctcccttcccgggccgaaattcggtatatacggcatccgcaaactgctgggcgaatttgaaagaccgcttctgatgagcatatttaaaggcgtgatcggacgggatctcgctgacattaaagaacagctcagacagcaggcgctcggcggcgtggatcttattaaagatgacgaaattttctttgaaaatgaactggctccgtttgaaacccgcattatcgaaggaaaacaagtcctgaaggaaacccgggaggaaacggggcataaaacgctgtatgccgtaaaccttacgggaaggaccgctgaattgcgggataaagcgaggcgcgcggcagaactcggggcggacgcgcttttattgaatgtgtttgcttacggtttagatgtgatgcagagccttgctgaggacagggaaatcccgcttccgatcatggcgcatccggcagtcagcggcgcgttcacatcatctcccgtttacggcttgtcgcatgcgcttttgctcggcaagctgaaccgctattgcggcgctgatttcagtttatttccgtcaccttacggatccgttgctcttccgaaggagtccgcgcttgcaatccatgatgaatgtgtaaaagacgatgtctttcatccgtcgtttgccgtcccgtcagcaggcattcaccccggtatggtgccattattgatgcgcgatttcggcatcgatcacatcatcaatgccggcggaggcattcacggccatccgaaaggagccgagggcgggggaaaagcgttccgcgccatcattgatgcggtgcttgaagcgcagccgattgaagaaaaagccgcgtcgtgcaaagatcttcagctcgcattagacaaatggggaagggtggaagccgtatgacccgcacaccgctgattatttgtgatttcgacggaacggtcaccatgaacgacaacattgtcagcatgatgaaagaattcgcgcctcctgagtggcttgaattaaaagacggtgttctgtctaaaagcatatcaatccaagaaggagtcggccggatgttcggactgctgccgagcagcttaaaagaagaactgaccggctttattctgaaggatgcgaaaatacgggacggctttttggattttgtctcgtttgtccggtcaaacggcctcccgttttatatcgtaagcgggggaatggacttttttgtgcatccgcttttggaagggatcgtagaaaaggagcggattttctgcaatcatgcatcctttgacaatgagcatattcatatagactggccgcacgcctgtgacggagactgtaccaatcaatgcggctgctgcaaaccgtcagtcatccgtaagctatccgatcagcagaaatttctcattatgatcggtgattcggtcacggatgtcgaggctgcaaagttgtccgatatgtgctttgcgagagattatcttttaactgaatgcaaagaactcggcctccggcatctgccttttcaagattttcatgaggtgaaaacaggcattgaaaacatcggggaggtgcaggcatggctgcaaaagaagaacgctggcgcgaacttgccgaggtaaaacgcgagctggctgaaagagactggttcccggcaacgagcgggaatctttccatcaaagtatccgacgggccgctgacttttctcgttacggcgagcggaaaagacaaacgaaaagaaacagacgaagattttctcttaatcgatgagtacgggaagcccgctgagaccggccattctttaaaaccttcagcggaaacgcttctccatacttacttataccaaaagacagacgccggctgctgtctgcatgtccataccgtcaataataatgtcatctcagagctttacggggatgaaaaacaaatcacttttcaggggcaggagatgattaaggcgctcggattatgggaggaaaacgcgtccgtgaccgttccgatcattgacaatccggcgcacatcccggcattggccgaaaacttcgcgcaccatgcggccgccggctcaggcgcggtgttaatccgcaatcacggcattacggcatgggggcggaccgcatttgaagcgaaaagggtgctggaagcctatgaatttttattcagctgtcacctcaagcttctgtcacttcggccgcagctggtaaaataaaaggaggaatagaaaatggcgaccatcagaattcatgacgaaaaaaatacgctcattgaacatcaggaagaagtagcgcgcttcttagacgaacaagaggtgatctatgagcagtggaacattgaaaaacttccgtctgagctttcggaaaaatacgatctaaccgaagatgaaaaagaacggattctcgcggcgtttgacacggagattcaggacatttcagcccggcgcggatatcagtctcaggatgtcatttctttatcagacaccacgccgaatcttgatgaattattaaaaaatttccaaagagaacatcaccacacggatgatgaagtccgctttatcgtcagcggacacggcatcttcgtcattcaaggcaaagacggcacatttttcgacgtccgtttaaatccgggagatttgatttcagttccggagaacatccgccactactttacgcttcaggaagaccgccgggtcgtcgcaatccgaatcttcgtgacgactgagggctgggttccgatttacgaaaatgaaagtgtgcaaaactgatagacgcccgaacctctcatgcacccaccggcatgagaggttttttattgtaatataaagtcagctttggctgttttttaattcttgaatatgccgcattctgtttatatcattacccgaatgggtattattctcttattcatgctaaagattccaatatgaaatgaaaaaataagttatttagtaaaaaaatgtttacaaataaagtataatctgtaataatgctcaataacccaatcaaacttgtttcctattcttttagcggtgaggggtgaagtgaatgggcagttattctgaacaagaaaaattgcttctatctattgataaaaaaagaaaaatgatgatagatgcggctaacaggcaagggtttacaggatatgacacgatcaggcacagccaggaactggactgtctgatgaacgcgtatcagcagctggtaaaccgtgatcgtacacatcaccaaggaatacagggccttgtgaagaaaataggcttgttctcccgcggtgacgtcatgcctgcatatgaagcaaacaaatgatggatgataaaacagataacgaagactgaatgcgcttcctgatcaagcgccgcatccgaaagatgaccgcgtacagtcagcacatttttccgctggcacggctcacgaagcgcctcgtactatctgccggctatgatgccgttcctctggtatatcctcttacaaatactcttctttaaataaaaaacaccccgatcagggtgtttttttcatcgagaagcggcagggagggtaatggtgacctctgtgcccttatcgacttcgctttgaatgtcaatcgaaccgccgtacatcagcatgattcgtttacatacgacaaggccgaggccggtgcctttttcctttgacgttacaaacggaagaaaaatgtgctcaagcatatcttcagaaatgcccattccgttgtcagccaccttaatgactgctttatgatcgcgggcttctaaatagatggacagccggccgccttcctgcatggattccagcgcgtttttcgcgacatttaaaatcacctgtttaatatggtctttcgtgcagttgaccttgagcggccgattgacgagaatctccacattcacttccacattgtatagattcccttcagaataaataatcggcataatctcatcaagaatatcctgcagcgagttcacttccaaccgttcagcagtgggttttccaagcactaaaaactcactgacaatctgattgatccgtttaatctcctgctcaataattgagaaatacagctgatcttcctccgatttgtattttttctgcaaaagctgaataaagccgctgatccctgtaagcgggttgcggatttcatgggcggtgctggcggcaagcgttccgatcagctccaatttctgcgcttcattttgagcgcgctccagctgggtcttgcgcttaagcaaataatattgaacgaggatgaacagaatattcagcagcacggcaatactggacatcggcagcagcacgcttttggtcagctcattcagctcaaccggtttcggataaacattgatattccaattaatatcatccagatagccgctgaccggtttcacaccttctgattgatcagcccgtccgctggcaaatatcactttattctgattggttgccttgacataaacgtcagggctcagcatattgatcatatttctcaaataatcgacttgtatggcggctactaaataatccgtgacttcccgttttgcgtctaacaccggcacgcagatcgtgaagatgcgctggcctgtaattctgctggagtagtcatttgtgatgaccgtttttttcgtctttttcgccttcgtaaaatacggtctgtctgccaaattcacctttgatttcagatcagtcgtgcttgcgatgacatcacctttggaattcagcatatacagtccgctgaatctgggttcatcttcaaaagcctgatcgagaatgtcaatgatcttttcttcattgacaggcttatcgacagcgatcgcaagtgttgtcatccgggcttttgtttcaccgattaaataattgagcttattgcggtgaaggttgagcatcatactggcttcctgtatgtgtttatcggctattttctgcttttctttttcataaatgaaaaagctgataataagtgccgggatgatcaccaatatgagataaagcttgatctttccccgggcacctttaaatgtattcactctgcatcgctccaacattacacttgaatagaggtattatatcatttttatacttctttaataagaaaaaataaccaaaatgatagaaaaacaaattattttattaaggtcagacaaaaagaagagaaattttggaaacatttttgttgacatttttcattttgtttattaatgtttctctgtaacggtttcttttgtaaaaggatgattgaatgtatgacggataaaacagaaaactcattgaaattatttattgtactgtcacgtgcgtaccgatctattaacgaccatatgaataaacatattcataagcacggcctgaacccgacggaatttgcggtgcttgagctgctgtaccacaaaggcaaccagccgcttcagcagatcggcgacaaaattttattagcgagcggaagtattacatacgttgttgacaaattagagaaaaaagaacttctcatcagaaaagcctcgccgactgacagaagagtgactttcgcacagatttccgaaaagggaatccgtcttttggacgatattttccctgatcatgctgacgaaattaaagaaatgatcagtgtgctgagtgatgaagagatagaaatgtgtacggaaatgctgaaaagagtggggttaaacgctaaacattttcatcagaaataaaaaaggaagccatttgaaaggcttccttttttatattactgattttggtcagccgcggcgtttctaggctgtatcaatacctcgacgcgcctgtttttgctgcgcccttcagcggttttgttcgacacggccggtttatactctccgaaacctttggcgctgaatacttttgcgtcaagtttcgggttttccgtgagaatagccatgaagttgacggcccgcatgacgcttaaatgccagttagattgatattgtgagtttttaatcggtacattgtccgtatgtccgctgataataatgttccttggcggattcagcacaaggagattcgagatttccttggcaagcggaatatcttcctgacggatatccgcccgtccggaatcaaaaaagatactgtctttaatggtaattaagagtccttctttagtcagctttgtttccagctgagtttcaagctttttattttttataaattgattgacttgcttttgcacgccttcaagttcttcgcggtcggctgcttctctttctttctttttctgttctttatctttttccttgtctttttttaactgatcaacgccgtctttttcgttttcaggaggggtgacgcttgaatattcaagaacacccgtgcctccggtaaacacggcgttaaatgatttagacagcatttggaatttcgccgcatcgaccgagctcatggcgaacaatacaatgaacagagccaaaagaagggtgagcaaatccgcgtacgggatcagccaagactcatccacatgctcgtcatcatgcttcttcttcttttttctcgccattgtttgcctctccttcttgttcagcgacttttgcgcgttcattcgcaggaagatacatgagaagtttttgttcgatcactttcggggcctgtccttcaagcactgacagaacgccttcgatcatgatttcacgcagtttgacttcctgctttgatttgcgtttcagtttgttggcgaagggatgccatagtacatatcctgtgaaaatcccgagaagggtggcgacaaaagccgcactgatggcatgtccgagcgcctcggtattgttcatgttggaaagagccgcgataaggccgatgaccgcacccaaaacgccgagtgtcggcgcatatgtgccggcttgtgtaaagatggctgcgccggcctggtgtctgtcttccatcgcttcaacttcctcagtcataatatctctgataaattctgcgctttgtccgtcaaccgccatactcaggccgtttttcaaaaatgcgtcatccacgtcttcaatgcttgcttccaatgcgagcagaccttcacgtctggcgatttgcgcccattgagagaacataggaattaattgcgcaattgtcagctgtttgttttctttaaacagcactttaaaaagggcaggcacttttttgatttcttttccggggaatgcgatgatcaccgcagaaatcgtaccgaacaaaataatcagaatagctgccgggttagcgagtgcgcttaagctgacccctttcagcaccatgcccacgcttaaagcaatcaaggcgaggatgataccgataatcgatgttttatccatagttttcaccaaatcctttatactagctttctatggttaatatcggtggcagtgcatggaactttagggtgattgagaaattgttcccgaattcttcacagtttctccctttcggcatggagaaagaaacaaaaaagcggctccccgcgaggagggaaccgcttttttcttattgtgcccggactttgatgccgtcctcttccattacgacatggaaggcttttatttcgttgtcatccaataagagatctgtcatttcgtcctcgatcaattcttggatggttcttctgagcgggcgtgctccgaaagctgggtggtagccgatttcagcgattttttctttcgcttcgtccgttacgctcaggctgatgccgcgctcttttaatgtgtcttcaagctctgtgagaagcaggctgacgattttcacgagatgttcttttttcagggattggaattcaatgatgctgtcaaaccggtttaaaaactccggtttgaagaacgcgctcagtgaatcaatcagcgtttgttcctccaggacgctctcttcagattggaatccgactttcacctgtttttcgccggttccagcgttgcttgtcataatcaaaacggtatctttgaagctgaccgttctgccctggctgtctgtcagacggccgtcctccataatctgcagaaacatatgctggacatcagggtgggctttttcaatctcatcgagcagcacgatgctgtacggattgcggcgcactttttccgttaattgaccggcttcatcgtgtccgacatatcccggcggtgaaccgataatttttgatacggcgtgtttttccatgtattcactcatatcgagacggataatggaatcttttgtaccgaacagttcatctgcgagtgtctttgataactcggtttttccgactccggtcggtccgacaaagaggaaggagccgacaggtctgtttttggattttaagccggcgcggcttcgtctgaccgctttcgccacttttttcacggctttttcctgaccgatgacgcgctgatgaagatgctcttcaagttccttcattttgacttgttcatcagcctggagttttccgaccggaatgcctgttttctgttcaatgatggcttgaatatgctccgccccgatttcaggtgaagaggccggtgtttcatgcgccagctgcttttccaacgccgcttcttcatcacgcagtttcgcggcaagctcataattttcttcatgaagcgcttttgttttctccgcgtcaattgctttgagtctctcagccgcatcttcttcatttacggtatcaagctccaggttcgccttagagccggcttcatctaataagtcgatcgctttatccggcaggtggcggtcctgaatgtaacgggatgaaagcgtaacacaggcgtttatcgcttcattgctgaatgtgacgccgtggtatttctcatatttatctttaatgccttccagaatgctgatggcttgttctattgtaggctcgtgaaccatgacaggctggaagcgtctttcaagcgccgcatctttttcaatctggcggtactctttcagcgttgtcgccccgatgacctgcagctcgcctctggcaagcgccggtttcaggatgttcccggcatccattgatccctcggcagagccggcgcctacaagaaggtgaatctcgtcaatgaacaagatgacgtttttccgttcttttaattcgttcattaattgtttcattctttcttcaaactggcctctgatccctgtattggcgacgagagaagcgacgtcaagcaggtaaagctctttgtttttcaatttgttcggcacatcgccttcagcgattttaagcgcgaggccttctgcaatagccgttttaccgacgcccggctcaccgatcagcaccggattgtttttattccggcggttcaaaatttcaattacgcgcgccacttcatgatcgcggccgatcacagggtcaatcagacctgcttttgcgccgtttgtgacgttttgagcgagctcgtcgagcaggcctttttcagggccggcctgctgtttattttgattgggagcgaaaccttgctcaaacgggaatccgaatgattgcggccccatgctcatagacggttttcgggttaattctgtataacatgtttcacataaaacgaattgtttttgaatggaattgacttgcatgttcaggcgaatcgtcgcctcgtttttctgacaatgttgacaacgcatttgccaaaacctcctcgaaaaatgtttgatcatctttgaccaaatggattagaaaataaggtcttaactttgaccttctttgattaatagtatactctgaccttctttgactttcaagtgttttgtttcaaaccctgaaaaataaatgtttacagcatgataagtgatatttgtgaggtttgattgtttttgaccaatatagtcagaaaggaaatgaaatgttttgacctttcttgatgaggagtatacgccggccctttttttctttcaatatttttgcttagaggagagagctgaatctgttttctccggggaaggacgatttgttcgtcttttcgggcgacttgtctcataagcatatataaaggcctggacaaatctgcgcttagccggagggtgaaatgggacaaacaaaaggttctgcaagtcagcttgcatttgtatacgtaggcacggttgtaggagccggttttgccacgggacgggaaatcgttgagttttttctgaagtttggctggatcggtctgttcggtatcgtggtaagcggtctgatgtttacatatttaggcgccaaaatcatgatcatttccaaacggattcatgcagcatcttatcaggaattgaacacatatttattcggccagtccatcggccgcgccgtgaacatgtttatgatgtttatattgctgggagtgacctctgtcatgctgtccggagcgggagcgctgtttcatgaacagcttggctggtccgcacaagcggggatccttctgacgatcgtactgagctttgccgtcatgacaagcggcgttaaaggtgtgttcggcgtcaatatattggttgtgccgcttttaatttccttctcttttatcgtgacagcagattcatttgtatttacaagcacgagaaacgcggacgaatgggtatggcctgacaagtggaattggcttttgtccgccgtctcttacggcgcgttaaatttatcgctcgcccaagccgtgcttgtgccgcttgcgaatgaaatgtcttcagagaaggtgatcagaaggggggcttattttggcggcgttctgttgacactggtgcttgccgcgagctttttatcattatcggtgctgccggatgtgctggagtttgacattccgatggctcaagtcgtctattcgtattcgcgttcgcttcatatcatttatttgtttattattttcggagaagtgtttacgtcggtcatcggtaatttatacggattggaaaaacaattaaacagttttcttcatataaaaagtacatatatttacggcggcattttggcgtttgctttcattatcagccaaatcggctacggacagctgatttccaccgtttatccggtgtttgggtatgtgagcctcgctttcatcggcgcattgatttgcaaaaaaatcccgaaagaaaaataaggatataaggaaaatgtctgtattttttgggaattccccttcttttttcctgacatttctgtataatgaattgggaaatgatggggaggagtaagagatgaaagctcgacgtgtattattgggatttatttttatttgtatcggcattgcgttttttttacagagggcgggagttattcatatatccgcaggttcggcgtggccgtttcttttcattataatgtccgcagggtttcacgccggatttatttttgcgaaaaaaacgcctgaccaggcgggactgctcgttccgggcggtatgttttttgtgctgggctgcctgttttgttttgaaacggcaacgggatggacgtattcaggcgtgacgtggcctgtttatatatgggcgcctgctctcggtctgtttgagctgtggtatttcggcgggaggaagttaggtgtattgattcctgctttcatcctgacagccgtgggagcactatgctttgccggtatgctgatgacggggctgtggccgcttttgatcatcgcagccgcgcttttgtttcacgccgctgcctttatgcagccgaaaaaaagatcgggccttcttattccgggcggcattttgcttgtgacgggttgcttgttatggtttgaaacgctgacggattggacttacgcaaatgtgacatcgcctgtctacctctttgccgttgcgttcggtctgtttgaagcctggctgttcggcagaaagcagagagggcttttgactgctgctgcggttctgtgcgccgcgggcattttcggcatattcaccaatgcaaatgaagtcatcagcgagcgcggctggcccgctctcattcttttgctgggcgccgcttttcacattccgattttcggcccgaaacctgtcaaaaacgcgggacttctcgtaccgggcggcatcttattgattacggggatcttgtttgtctttgaaacggcaaccaattggtcctactccggtgtgacatggcctgtttacctgttggcaacggcattcggtttatttgagctgtggctgttcggcgggaaacagaaggcgctgctcatcccggttgcggtgctgaccttgacagcactttgctttatgatgacgaatcagccgatcattccggtttctgttttctggcctgctttatttgttctgatcgggattgcgctgatggtatttccggggaaaaaacgcggggcttaaacccgattttgcagcctgacacagggttcaggctgttttttttattgtcacgggaaacaacattatggtatgatagcaaaagtgaaaaaagaagaaaatccgtattgatgcgggagaggttctagctacaccctctataaaaaactaaggacgagctgtatccttggatacggtttttttatgttttttagggcgccttctccgaaaaaggcgctttttttatggaatgatagataagggagagaaagacatgaaaaaagaaaaagcagttgtggtgttcagcggaggccaagacagcacgacttgtttattatgggctttgcaaaatttcgaagaagtggaaaccgttacattccattataatcagcgtcaccaagaagaaatcgatgtggcaaaatcgattgccgaaaagctcggtgtcaaaaatcacttgcttgatatgtctcttttaaatcagctcgcgccgaatgcgctgacaagagatgatatcgaaattgaagcgaaggacggggaactgccgacaacctttgtgccgggacgcaaccttgtatttttatcctttgcatcgattcttgcatatcaaatcggcgcgcgccacattatcaccggtgtttgcgagactgatttcagcggctacccggactgccgtgacgagttcgtcaaatcctgcaatgtcaccgtcaacctggcgatggaaaagccgttcgtcattcatacgccgcttatgtggctgaacaaagcggaaacgtggaaacttgcggatgagctcggcgcgctcgattttgtaaagaataacacactgacttgctataacggcatcattgcggacggatgcggcgaatgcccggcatgcctgctccgcaataaaggatatgatgaatatatgaaaatgaaaggagagcgaaactaattgctttctcaaatttatccgcaggttcagcatccttattcgtttgagttgaataaggacatgcacatctcagccgcgcactttattccccgcgaaagcgccggagcgtgcagcagagtccacgggcacacgtatacagtaaatattacagttgcgggggatgaactggacgattcgggctttctcgtgaatttcagcgtgttgaagaaattggtgcacggcgcttatgaccatacattgctgaatgaccatgaggaattttctgatgatgacagatattcactgccgacgaccgaggtcgtggccaaaacgatttacgataaggtgcagtcctacctcgaaacactggagaatcagccggtctgcgtgcagatttttgtcagggaaaccccgacaagctattgcgtataccgcccgaaaaaaggtgataggaatggctaaaggaattccggtattagaaattttcggaccgacgatacaaggggagggcatggttatcggccagaaaaccatgttcgtccgcacggcgggctgcgactactcttgcagctggtgcgactccgcttttacatgggacggctctgccaaaaaagatatccgctggatgacggcggaagacatttaccgcgagctgagagaaatcggcggagacgccttttcccatgtcaccatctcaggaggaaacccggcgctgttaaagcagcttgacgcgctgattctgctgctgaaagagcacggggtgcgcgccgctttagaaacgcagggaacggtctatcaggattggttcacaatgattaacgacctgacgatttcaccgaagccgccaagttcggggatgacaaccgattttgcaaagctcgatcacattgtgtcttcacttgatgcggcagaaaggcttaacgcggtcagcttaaaggtcgtcatttttaatgatgaagatctgcaattcgcgaaaaccgtgcacaagcggtatccgaatatcccgttttatcttcaggtcggaaacgataacgtccatacgacggacgaccgggcattgatcgcacatctgctcggaaaatacgaaacactcgttgataaggtttcagccgattcggatctgaatctcgtcagagtcctgcctcagctgcatacattgctttggggcaataaacggggagtttaatagaaagggagatttatatgacaagaaaagaatcagaattagaaggagttacgctcctggggaatcaagggacaaactatttatttgaatatgcgccggaggttttggaatcatttccgaataaacacgtgaaccgtgattatttcgttaaattcaactgcccggaatttacgtcgctttgcccgaaaacgggacagccggattttgcaaccatctacatcagctatattccggacgaaaaaatggtggaaagcaaatcgctgaagctgtatcttttcagcttccgcaaccacggagatttccacgaggactgcatgaacatcatcatgaatgatttgatcgaattaatggacccccgctatattgaagtatggggcaaattcacacctagaggcggaatctcgattgacccgtatacaaactacggcagaccgggaacaaaatatgaaaaaatggccgaacatcggatgatgaatcatgatatgtacccggagacgattgataatcggtaattattccgttgtgtgatacggagtgtgaaacgaagtggagtcacagtaaaatccgaacattcagtgctgattttcagcggaattgtgaccgagtcacagcgaagtgtgaccagcactaagctcaataaaagtgtgacctgaggtgcaacctgaactgtgacttttatgcagtgaaaaattgatagtacagaagcagattaaggcgtacaatttgtacgtcttttcttttttatccgaaagaaaaaatgcctatctagagatcataggcattaaatattattatcaatatcttcatttattttttggctaagtttctgaaccttctctttaacatttgaaacagctcttttttgaatttcatcaaagttttcctgaatatagtccgtgacactacttattagaacttcactttcaaaattgaatatctcatttatttctgactgttcttcatctgttaggtgatggtattgaagttgtttagcatttacttcagcagctacatcaatcctaactttagttgttctggttgtacaatttcatattcaccttctgcatacttttgctccgcataatggcctccccattgacagagctcctgcaagataggtttaagagattctccaagttcagtggatgaatattcaaccttcggcggtacttgattatacatctttctgctcacaagtccactggcttcaagctctctaagtgtttgaatcagcattttctgagttatatttgggatcatgcgctttaattcactcgttctctttggtccattcattaaaaagtataatacaaggcctttccattttccgccaataacttcctttgtcacttcaaacccacagctaaattttttcatgtctaaagctctccattccacatttattactttttagttactatatcacaaaaaagtgggtacttccgataatgtgcttactgaaggatactatatcttgtaagttgttcttcaagtacttaaaggtactagacataaaataaaatcaattctaaaggagtgttaagtatgggtaaatttgaaggtaaaatagcgcttgtaacgggtggaacaagtgggattggtcttgctacagcacaaaaatttgtaaacgaaggcgcatatgtttatatcacgggacgcagacaaaacgaacttgataaagctgttaaccaaattggcaagaacgtaaccggtgttcaaggtgatatttctaagctagaagacttagacaaactatatgacatgataaagcaggaaaaaggtaagttggacattctttttgctaatgcaggcaccggcaacttccttccattaggtgaaattactgaagagcaggttgatagaacgttcgacattaacgttaaaggaaccatctttactgttcaaaaagcgttatcactattcccggacaaagtaggttctattattgtaacgggctctactgctggatcaattggcaacccagcgtttagtgtatatggagcatctaaagcagcattaagagcactggttcgcaactggattcttgacctaaaaggtactgaaatccgtgtaaatgtggtgagtccaggagttattcttacacctgcatacgatgagctttttggtgatgcacttgaaggagcaatggaaaataccagaaatactgttccagctggaaaagttgggacacctgaagaagtagcaaacgctgtatctttccttgcttcagacgaaagcagttacttgacgggtgttgaattgttcgtagatggcgggctagcacaggtataatttcactgcgcagagattacaaatagtccccaaaaaaggttaaaatcaatcgtttggtaaggtgtgaaattggtgtgacttcatgattaatgtctagagcaagtacttatgggacaagactttgacctgccttttcttccacgaggactgcatgaatatcatcatgaatgacttgatcgaattaatggacccccgctacattgaagtatggggcaaattcacgcctagaggcggaatctccattgacccgtatacaaactacggcagaccgggaacaaaatatgaaaaaatggccgaacatcggatgatgaatcatgatttgtatccggagacgattgataatcgttaatcactataaaagcgtgcctattatgacttttatgcaaataaattgctattgcggaggtaatgtaagacgtacaaatgtgtacgtctttttcttttaagcacaaaaacaatttattaacgaaagtattttggcagaaaggctaacaaaatcaaaggaaaatatgttgtagattgctttctttttttgtggggcatccatatccaatcacgttatcttgcacttgaacattttttatagactggtaccgcgacaaattatttctcttctacataccaataaagtagacattaaaaagtgaaagagagggcgaaaatgtgtgaaaattcttttcctcgagagtcatcccatgtggctctatggtttaccaaatgggtttagggaagcaggacataccgtaatgatttccggtcctgtaagtcgggaaaatatcactgaaatgatagacgaatttaaaccagatctaatagtatctatgggatggacaccagagcattcaagggaaaagcaggcctggattcgcaacgctactaaaaaggtgaatatccctctcgtttattgggcaactgaagacccgctgcacactcaaaactttactatcccgttaattaaaaaggtgaaaccagattttgttttcacggttacgccttctctgtgtaaaacttatgaaagcatggggattaaagcagctcacttagactttgcatttcacgaaagtatacatcaccagattaaaccattagcaaaatacagttgtgatatagcagtggtggctaatgcttaccctaattttcttgaagaacatccggaagtgttccgttcgtcctctttaaaaacgcttattcgtcctcttatacggaagggtattcgcattgatttttgggggagaaactgggaaaaaatgagtaaatatataggaagagaaattccccgcaattggatccatggataccttgattatactgaagcatataaagtctacagttcagcaaaagtcgttatcggtttgcaaaactgtgaaagccaacttacgcaacgcacctatgagattcttggttccggaggggttttattgacatcggatacaccagcagttcgaggtaaattcaaacctggccgcgatctcatcgtttcttcctccccaaaagaaacattggaaaaggttaaatactatttgaatcatgatagcgagagaaaaaagattcagataaacggtaaaaaggctgtaaagaatgattcctatctgcatagagccgagagaatgcttgaggtgctaaaaagcagaggaattataagaaacttaggggaaaccattcattatgtagatgttctcaaagaaaaatacgtgatccatcatgttactcccggtgaaacattatcaataattgccaggaagtataatgtttccctgcagcaactcatggagcttaatcatttcaaatcagatcaaatatatgctggacaaatcattaagattagagagaaactgtttagaaatattgataacaaatttttctaaaggagagtaatatgaatgaaggggaaaatacctaaaataagaaatcaagcgaataaagtaaaaagaacgcctcgttatatggaatttcccgtgacatacgaagtatatcatgtggaatccggcgatacattatggacgatttctaaatccttcaatatcccggtacaacaacttatgaatcttaataagctttcttcagatagaatttatcctggacaaattataaagataagagaaagataatctttgaggtttcggaaacgaatcaaattgaaatgacaatcctcatttttttatttgtggggaacttgatatttttggggatgaaggggttatgagatgtttcaaatgagctatttctattctggattaggatgggattttattcaacacgttgatcaaacgaacggagtattaaatgttgtgtctcctgattttttctatatcagaaaagatggatcattacttctccgttcagctaatcccgatgtgattaaagctcttcatagaagaaaattaaaagtagttccttttctaagcaatcattgggatcaggatttggggcgattttcattaatgaaccgagttcttttagctaaacaaatttctcatgcaatagaagaactggatttggacggagttaatatcgatatagaaaaccttacagaaaaagatcggaatttatttacagattttgttagattggtaaggaaaagtattcctagacataaagaagtatcagttgcagtggcggcaaatccttttggctggacgaagggctggcacggatcatatgattacgagtatttagctaaatatgcagattaccttatgattatggcctacgatgaaagccaccttgctggacctactgcaagtgtaggatgggtggaaaagtccattcaatatgctctgacccaaaaaatctctcctaaaaaactagttttaggattgccattctatggccgctgttggatgaaaggccaatctgcctctcaagccattcccctttaccttgttgactcattagtaaaaaggcataacgggacaattatttttgacacaaagagtcaatctccaaaagctatttttactgtcaatcacgataacaaggggctgttgccttcgggaacatatacattatggtttgaaaatgaacagtcactcagagcaaaaataaaactcgctcaaaaatataatctgaaaggtcttggtagctggagtcttggacaagaggatgcgtcagtctggaatacagtgtttaaaaatatataatgatttatagttcaaagcaaaattcgaagataattgcaatgaatctctatcctgaatggatgctggtttatctaaaaaacatgatgagaattgattgaccactctcattaaaggatggggaaattcaaggcgccaaggcacgtggagaaccatgacttgttgataatcgaccatatagtttctcctcagaaatgagggggttttacataaaaaagacgagcgaatccggggggaattccactcgccgctttctaatgaaaagacgggatgctggatggcagctcgtctgtttcattataaaatagggaacgtatgtttgtaaaggcctgcgctgttttttctcattcggagcggatcaattgtcaaggaatggtcagcatgatagcatgtcctgtaaaaagaaggagtgttcgttatggagccgttagagttaaacggtgtaagactgaaaatgtatgattgtaaagaaagtgcgggtgaaaacggccgcatgatttcatttatattgaaggtgacctctgaaacgtatcatgatattgccgtccttttgtatgaaaaaacatttgatatcaaggcgcccgagcgtgggcttgaattccgcggtaaaataaccaactactatacatccgtcactaatctttacaataaagatgagacaggtgatttttttgtagaaatgaccgagatctgaattcatttgaaaaagctgccgggcggcagcttttgtgcgggatatgtaaatggttcggattgttcggggggtttaataggagtctctgatgattttataattcttatgattgacgacagtgagggaatctaattcaaggtcacgataattatccatgatggttacatcaacgatgacggagttttcatttactttttcaacaataccggttaatccgtttttaaattcaatgacgtttccaaccttagcaattttcacgagcttcctctcctttatcataaatcctgtttgaaaatattttgcagtattttctttaagaagtaaagcgatatgggtatcagcccgctcaatcattgtcccggcgggggaaagatgatatattgattttcgggaaaaagccgagaaaaggaggctgtgttcgttgctgcctgaggaaatttcagaatgtatcaaccaaatgcgcaccggggaaatcaaagaattcagggtgcagaaagaacattttcttgcatttcgagcagttttatcgaagcaggaagattttaagcatttccgcggtattgcacagcagggcggagatgttgtatttcagtatttagaacagccaagaagctgacggctcctcgcacttgaggagtcttttttttgttttttggtttctcatttcatcttgctgtaacagatgtaaacaaaatgtaaaatccctccgatggatacttttactgctatttggttaatgttgtgaaaatgacggctgttttcctgccaataacaaggctgttaacgaacttcttccatcataaaagctgattgggagcactggaaaatctttaaccgtgaatttgcgcacagctcttgttaaggtagtgaagtatttaaggaggaaatcgtatgacgacaaaatttgctgccttggctgtcttttttctatgttttatgcctgcatcaaaaattgaacatacagaagctctgtttacttttgcgaagaagccaaagcaagaacccagcacactggttgctgatttaaataaaaaaagctcggttccgaagctttcaaaaacggatcataagcattctatccaaccgataaagctgtcatctcaccaagagaagaaggcaaaaccggaagagacggcttatcagccgccgaaaaaaacgtattcccgcgctgacagacaacttctgtcacgtctcgttcacgcagaagcgaaaggtgaatcttataaagggaaggttgccgtagccagcgtagtgctgaaccgcactgaaaaaaacggcttcccggataccattcggggtgtgatctatcaaaggaatgcatttgaaccggtagcaaacggaagcattaatcaaaagccggataaggattccatcgccgccgcaaatgaggcgcttgaccatccgggcagagaaacgaacgcgttgtttttctacaatccgaaaacggcatctgaccactggatccgttcccgaaaaattatcgaacggatcggcagacacgtatttgcgatgtaagcatagcgggatcaaaaatatcccggctatgcttttttcaattttgagaaatcgaaaatattttcagaacttgtctcatatgatgatggaagaacgagagacaaggagagacaccatgaatcgatttgtgaaagggatcattcttttatccatcgccgcctttttcgcggaatgtctggaatttgtcgtgaatatgatactggcgcgggagcttggcgagcatgggatgggactttacatgagcattctgcccaccatttttttaattatcgtcatcgccagtctggagcttccgatctccatttcaaaattcatcgcggaatccaatcagaagctgcatgaaagcatgctccggcatgccttcagaatgaccgccgtttttaccgcgttttcaaccgcggccgcaagcatcgcgctgccgttcattcctgtattcgatacgtatcacccgtttattaaagggattgtcatcgggctgattccagtcgtcgcttttacatccatcgccagaggttattttatgggtgtgcagcaaatgggaaaaatcgcggttgcgaatgtcatgaaaaaaatcattcaagtgctttgtctgtttatcttttttcaatggtactcttttgaaattgatatggccgtgctcatttcattatttgtgctggtcgcaagcgatgtcgtggtgttcgtttacttgtatacgcagtttattttggcgcggagggcgctttccggccatcagcacattcatctgcgcggcaaggacgtgcggaaacgcctcctggccgtatccatcccgacaacgggacttcgtatatttcatgcggtgacgaacgccattgaaccctttttagtgaaaggagcgctgctggcgtccggggcagccgggacagccgcgattgatcaatacggcatgcttgccggtgttgcgatgacaatcggttcgtttcccgcatttatcgcccattcgctgatggtcgtcatgattcccagcatttcagaagcgtatgcgctgtcccaatatgatattgtgctgaaacggctgagacaagcgatttttattacattcggctacggcattccggcagtctgggtcatgtttcagttcgcgggcccgctgacccatttgttttttcaatctccggaagcgcagtattatttgcagcttttgtggccgttttttctttttcatctgtttgtgatgccgcttcaggcctgtctgatcggtatcggccacgtgaaaacggcgttttatcataacgtatggagcagcattgtagggctttcgatgatgtatgtgctcggttctatgccggaattgcaaatgctcggcattatactcggcatgaataccggcatgattcttctgacaagtttacattacgcgacgatctgcaaagacctcggtgtctccgtgtttttgacgggcggcggaagaacagcgccccggatcgaaagctgaaaaggctgatacatttcaataaggaagggcaagctatccgaaacgcgtgaaaggaagatcatatgcataaaaaccgcctaattgtatgtgcagtccttttgatagctgccgccgtctggatgcctgaagcaaaagcctcatcagaaaaacaggcagttcccgccgtgtttctgatgaagacgattgaaggagacgagatatcgattccgaataaagggcagaaaacgattttgcatttttggacatcgtggtgtccgccgtgcaaaaaagaactgcctcagttccaaacgtattatgaacagcatcagtccgatgatgtaagccttgtaacggtaaatttgatgaatgccgagcgaaacaaaaataccgttcaaaactttgtcagtcagcaccatctcactttcccgattgttcttgacacgaaaggcgagcttatgaaggaatacgatgtcatgacgattcccacgtcatttctgctgaatgaaaaaggagaaatcgaaaaaaagatcgtcggtccgatgaccgcctcacaattaaaagaatggtcagagaaataaaaaggtgctggaggaattcctcccgcaccttttttgcatataatgaacagctgaagaaacactaatgataattattatcaaaaagaaattaaaacaattataattgaaatcttccgccggcatgctataataaagaaaacactgcgataacactgtgaaaatgctgcctgtcaggcggctgttttgcttttatcggggaattgaagatgatttgcgttctcaattagagaggagaattcataatgaatgaacaagtgatgacacaaacccattcacaacagcacatacaagaagagcgggccggaaaaaagtggctccagcatgcagaactcattgcggcgctcgtatccggcgtccttattcttgcggcctggttttttaccgaaacaaaaggcctgtccgtcactttgtatatccttgccttcctgatcgggggatttgcaaaagcgaaagagggaattgaggataccattgagacgaaggcgttaaatgtggaactgctgatgatttttgcggctgtcggctccgccctgatcggttattgggctgaaggcgctgttcttatctttattttttcgttaagcggcgcgctcgaaacatatacgatgaataaaagcagccgtgatttaacatctttaatgaaactggaaccggaggaagcgacactgcttgcggacggacgggaaaagcgggtgccggctgctgaacttaagatcggtgacatgatcgtcattaagccgggcgaacgcgtagcagcagacgggatcattgagtctggcgtgacgagcctcgatgaatcggcgcttacgggtgaagcgatgccggcggaaaaaacagccggagattctgtgtttacaggaacggtaaacggaaacggctccttaacggtccgtgtgacgaaaacaaatgaacagtctttattcagaaaaatcatccggctggtggaatcagcccaaaacagcgtgtcaccggctcaggcatttattgagcggttcgaaagtgtctatgtcaaaggcgtgctgttagccgtggctttgcttttattcattcctcatttcgctttaggctggagctggagtgaaaccttttacagggcgatggtgtttatggtggtcgcctccccgtgcgcacttgtcgcttctattatgcccgctgcgctttcccttatctcaaatggggcccgcaacggattattggttaaaggaagtgtgtttttagagcagctgggaagcgtacggatgatcgcatttgacaaaaccggcacggtcactaagggacagccggcagtcgcggcatttcaagctgcggaacatgtgagtgaagatgagatcatgcaggcggtgtatgcgatggaaaagcaatcaagccacccgcttgcaaaagcgatagctgaatttgccgaaagtcggggcgccgcgcccgcaggacatctatcgattgacgagacgtctggattcggtgttcaggctgaaatagaaggtgtcaaatggatggtcggaaaagcggggtttgcaggtgaagatgcggcagatgcttttttgcaaacatcgggaaaagaattaaaggataaaggttttacactggtctttgttaaaaaagatgaccggattgcgggctgctttgccttaaaggatcaaatccgacctgaagccaaagccgtgatggctgagcttgaatcactgggcattaaaacagccatgctcaccggcgatcagtctgaaactgcggctgccattgcaaaagaggcgggcatgacgacggttgttgccgattgtctgccggaccaaaaggcaaaagaagtgaagaagctgaaagaaacgtacggcacaatcgccatggtgggggacggcattaatgacgcgcccgctctgaaaaccgctgacgtcggtattgcgatgggcgggggaacggacgtggcccttgaaacggctgacttagtccttatgaaaaatgatcttcacaagcttgtgaaaatgtgcagactctcaaggaaaatgaaccggattattaagcagaatattgttttctcgctctcggtcatctgccttttgatctgcgccaactttctgcaggtgatggaactgccgtttggcgtgatcgggcatgaggggagcacggttctggtcattctgaacggactgagattattaaaataaacatgacagccgcacatcgggcggctgttttttaaatgttcgttcacagcataaacgccggaaaactgatagaatgaataaagagtcactttggtaaggaggaaaagcaaaaaatgaacagattagaacgtgtttcatcttggctgaaaaaagaaggacatgatgcggcgtttatacatacaaaggaaaacgtattttatttaactgatttttacacggatccgcatgagcggttaatggggttgttcctgtttcaggaacaggagccgtttttcgtttgtccgggaatggaagccggacaagcccgcagcgccgggtgggagcatggtattatcggctacggcgatcacgaagatccgtgggagctgatcaaagccgagctcacaaaacgaaatgtgcggcttgattccatcgcggttgaaaaggattcgatctctctttcccgctcagaacagctcaaacaagcctcagggggcgcggcatttgtttcggcagaagaaacgctcaaccaattccgtctcgtgaaagatgagaaggaaatcagcattctcagggaagcggcaaagctcgcggattacggagttgaagtcggtgttgcggcgctcaaagagggtgtgagtgaaaccgaagtactcgcgcagattgagtttgagctgaagaaaaaaggcgtgcagggcatgtcattttcaacgatggtgctgttcggggaaaaatcaggccagccccatgggaatccgggtgcagaccggttgaaaaaaggcgatttcgttctgtttgatctgggcgttattcttgacggctactgttcagacattacgagaacattcgcataccaatcaatcagcccgaaacaggaagagatttacgaaacggtgcttaaagctgaacaggcggcgcttcaattaagcaaaccaggcgtcagaatcggcgatcttgatttaaaagcccgcggcattattgaaaaagccggatacggagactatttcccgcaccgcctcggccacggactcgggatttcggttcatgaatatccatcaatgagcagcgcgaacgacacactcctcaaagaaggcatggtctacacgatagaaccggggatttacgtgccggatgtcggcggcgtgcgcattgaagacgatgtgttcgtcacaaaagacggcgccgaagcattaacgcagtatccgaaagaattaacgattctgaaatagaaagctttgtgataaaaaaggacggttctggaacgcagcgtccttttttatcaccttttaaatgaaaaaatcatcaaaatgctgaaatggtttgatatcatgcttttcattcaggggccgcatggcaaggtaactgccgccgactatggcgagacacaaaccgattaagcaaagaatccccatcgctgttcttctcctttcaaacgaataggatgtatctgtttctagcttactgtatgaaacgcattccagatcaagggaaaaaaagaaaggggggacgccatggctacgatcagagacattgccggcgctgccggggtttccgttacaacggtatcaagagtattaaatgatcatccttatgtaagtaaggacaaaagagaaagagtgaaaaaagcgatgcaatcgctcggatatacgcgcaacattcatgctgtgcatttatccaaaggtttttccgatatgatcggcgttgtgcttccgtcggtgaatcttccgtattttgcggaccttgttgcaggtattgccgaggctgccgaagcgtcaggcgtgcatctttctttataccagacagattatcagcagcaaaaagaacgttttgccttatcacagttacaggagcgccaagtggacggcctgattatctgctccaaagcaattcctgatgaacatctgcttaccgtgaaagaaccgctcatcctctgccagtacactgatgcggcagggctttcctccatcagtaatccgcatcgggaagcatttcggcacggtctggattatctgatagaaaagggacaccggaaaatagcgatcagcctggccagaaaaaagggaaaaaacagtcaagtacgcattgccgcatacaaagaggcgctcaagaagatcgggcagccttacagggaagagctggttgtggaaaaggcgctgacgctgcttgacgggaaagccctttttcatagatggaagagctgggatgacaaaccgactgcgctgtttgcggcgaatgatcaagtatccgcaggtctttaccttgaagccaaggcaaatgggacgcgcatcccggaagagcttgcgattttgagcatcgacaatcatgatatcagcaagatgttaggtatttccacaatagatatacaaacaaaagaaatgggaaagcaggcttttcacatgcttgagaacaggatcagcggcgggcctccggcaaggaaagttcttgattaccgccttattgaacgatcaaccgtctaaaaaaagaattgacgcgctttccgttcgttttgtacgatatgaggtattgaatgacaaaggagctgaggatcatgaaggggtcctttacagttgaaaaggtattaaataacaatgtgctcatcgcaacacatgatagatacagtgaggtcgtcttaatcggaaaagggatcggctttggaaaaaaacaagcggatgtcattgaagataaagggtatgacaagatgttcatcttaaaggatgaaaaagaacaaaaacaatttaaaaagctcctcggttatgtggacgagacacttgtcgacatctccaatgacgtcatttatcatatcaagaagcggacaagccaaccgttaaatgagcatatccatattgcgctgactgaccatatcgcctttgcggtaaagcggctgcagcagggttttgacattaaaaacccgtttctaatggaaaccgaaacgctttatccggaagaattccaaattgcccgtgaagtcgtcggcatgattaatgaaaagacgggaatctgccttccggaaggagagatcggctttatcgctctgcatatccactccgccctgacgaatcggcccctttcagaggtcaatcagcattcacagctgatgtcccggctcgttcaggtgattgaggaatctttccagatgaaagtgaataaagaaagcgtccactatttgcggctgatccggcatatcagatttaccatagacaggattaatcgggaagagcagacaaaagaaccagaaaagttaatgttattattgaaaaatgaatacccgctatgctacaatactgcttggaaactgataaaaatcttgcagcaaatactgaaaaaaccagttcatgaggcggaagcggtttatctcacgcttcatttgtaccgattaaccaataaaatttcataatttcagttgaaaccttaaaaacgtgtcactgattcgatcaggcatgagtgattgagggtaaaaaacgggaagaacggtcccgttattttgcacaccctttttactcatgccttttttgttgtgtaaaagggcaaatgtaaacggttaaactgaagacttgcgccagtgaattcgttgtcatgaattttcgctgtaaggtcacactagctaacagaggaggtacatcttttatgtttaaagcattattcggcgttctccagaaaatcggccgtgctcttatgcttccggttgcgattttaccggctgcggggatcttgcttgcgttagggaatgccatgcagaacaaagatatgattcaagtcatgcacttcttaagcaatgataacgttcagcttgtggcgaatgtcatggaaagcgccggccaaatcgtatttgacaacctgccgcttctttttgcagtaggggttgcgatcggtcttgccaacggagacggtgttgccggaatcgcggctattatcggatacttggtcatgaacgtatccatgagcgccgtgcttatggcaaacggcagtattccgtctgacaaaattgaacgggcaaagttttttgcggaaaaccatccggcctatattaacatgctggggatacccactttggcgacgggcgtgttcggcggtattatcgtcggggttctggccgcgttattgttcaacaagttttataaaattgaacttccgcagtacctcggattctttgcgggtaagcggttcgtcccgattatcacatcaatttccgcattaattctcggtcttattatgttagtgatctggcctccgatccagcacggtctgaattccttctccacgggtcttgtggaagcgaatccaaccttggcggcctttattttcgggatgattgagcggtcattgattccgttcggtcttcatcacattttctactcgccgttctggtatgaatttttcagctataaagatgcggccggagacatcatccgcggagatcagcggattttcatggctcagatcaaagacggcgtacagctgacggcgggaacatttatgacggggaaatatccgtttatgatgttcggtcttccggcggcagcgcttgcaatctatcatgaagcgaaacctgaaaagaaaaaacttgtagccggaatcatgggttctgccgctctgacaagtttcttaacgggaattaccgagccgcttgaattctcattcttgtttgtggctcctatcctgtttgcgattcactgcgtattcgcgggactttcctttatggttatgcagctgctgcatgtaaaaatcggtatgaccttctcaggcggtctgattgactacttcctgttcggaattctgcctaaccggacggcttggtggcttgtcattccggtcggcttaggattagccgtcatttactacttcggtttccggtttgcgatcagaaagttcaatctgaaaacgccgggccgtgaagaagaggctgcggatgaaggtgcgggcgcctcaggcgaagccggcgaccttccttatgaaatcctgcaggcaatgggtgatcaggaaaacattaagcaccttgacgcttgtatcacgagacttcgcgttacggtcaacgaccagaagaaagtggataaggcccgtctgaaacagcttggcgcctcaggcgttcttgaagtcggaaacaacattcaggccattttcggcccgcgttctgacggtttaaaaacacagatgcaggatattatcgccggacgcacgccgcgccctgaaccgaaagtatccgcgcaagaagaagtcagccagcaggttgaagaggttatcgcagatccgctccgaaacgagcagggtgaagaagtgttcgcttctccgatcaccggcgaaatccatccgattaccgatgtgcctgaccaggtgttctcaggaaaaatgatgggtgacggttttgcgattcttcctgaagaaggaatcgtcgtatcgcctgtccgcggaaaagtgctgaatgttttcccgacaaaacatgcgatcggccttcagtctgacggcggaagagagatcctgattcatttcggaatcgacacagtcagtctgaaaggcgaaggattcacttcttttgtttctgagggtgaccgggttgaaccggggcaaaagctgcttgaagttgatcttgaagcggttaaacctcatgttccttcattaatgacaccgattgtctttacaaatcttgccgagggtgaagcgatttccctttcggccgaaggtaccgtaaaacgggaacaaaaagatattgtgaaaatcggaaaataagcatataaatacgccgtgcttgtcagatgacaagtacggctgtatgatataatattgtgtagtaaaatagctttaatttaaaggagaatgataatcatggcacaaaaaacatttaaagtaacagcagattccggaatccacgctcgtcctgcgacagttcttgtacagactgcaagcaaatacgatgctgacgtaaacttagaatataacggcaaaacagtaaaccttaagtcaatcatgggcgttatgtctctaggtatcgctaaaggcgctgaaatcacaatttccgcttcaggcgctgacgaaaacgatgctcttaacgctttagaagaaacaatgaaaagcgaaggactcggcgagtaatgcaagaattaaaaggaataggcgcttcagccggaattgcgattgcgaaagcataccggcttgaagagccggacttaacggttgaaaagaaaaacattgctgatgctgcggctgaagtaagccgttttgatgaagcgattgtacgttctaaagaagagcttgaaaaaattaaagagcatgctttaaaagaactgggacaagacaaagctgacattttctccgcgcaccttttagttctgagtgatcctgagctgttgaacccggtaaaggagaaaatcagcacagattcagtcaatgctgaattcgctttgaaagaaacagcttccatgttcgttactatgtttgaatcaatggataacgaatacatgaaagagcgtgcggcggatatccgtgacgtaacaaaacgtgtgacggggcacctgctgggcgtggaaattccgaacccgagcatgatctcagaagaggttgttatcgtggctgaagatttgacaccgtctgatacggcgcaattaaaccgtcagtttgtaaaaggttttacaactgatatcggcggacgcacttcacactccgcgatcatggcccgttcgcttgaaattccggctgtcgtcggcacaaaagcggctacagggacaattgaaaacggtgttacggtaatcgtagacggcatcgatggtgatgtgatcatcgatccttccagtgaaacgttaaagaaatatgaagaaaagcacagtgcttacctggcgcaaaaagctgagtgggcgaagctcgtcaatgaaccgactgtttctaaagacggccatcatgtagagcttgccgcaaatatcggcacacctgacgatgtaaaaggcgttcttgaaaacggaggagaagctgtagggctttaccgtacggaattcctttacatgggacgcgaccagcttccgacggaagacgagcagtttgacgcttataaaacggttcttgagcgtatggaaggaaaatcagttgtcgtgcggacattggatatcggcggcgacaaagagcttccttacctgcagctccctaaagaaatgaacccgttcttaggctacagagccatccgcctttgccttgaagagcaagaaatcttcagaactcagcttcgtgcgctgcttcgtgcaagtacatacggaaacttaaaaatcatgttcccgatgattgcgacagtaaacgagtttaaacaggcgaaagcgattcttctcgaagaaaaagaaaaactcgtcgaagccggcgtagcggtttctgacgatattgaagtcggtatgatggtagagattccgtctacagccgttatcgcagatcagtttgccgcagaagttgacttcttcagtatcggaacaaatgacttgatccaatacacgatggctgctgaccgcatgaacgagcgcgtagcttatctgtatcagccatacaatccggcgattctccgtctgatcacccttgttattgaagccgctcacaaagagggcaaatgggtcggcatgtgcggagaaatggcgggagacgaaattgcgattccgattcttctcggcttaggcttagatgagttctcgatgagcgctacatccatccttccggcaagaacgcagatcagcaagctttctaaaaaagaagctgaatcattcaaagaaacaatcttgtctatgagcacgacagaagaggttgtcgcattcgttaaagaaacattcaataagtaatacaaaagccagacggtgtaagccgtctggtttttttcatattcggaaaaaaggggggaacaataactttcaacaggagggattatcatgacaaaatcatttgcagcgggggatacggtctatgtgatttaccgcaatccgcatgccgccaatgttgcccatattaaagaggcggagatcgtccatcacccgtatcatgagggagaactgtctctgtttttatacgaaacctatcatccgctggccgaagatgacgcggtcttttcgacatatgaggaagcggaagcgctttacagcgagctttttgaagaagaccggtatcattgatcaaaggaaatgtttacaacgcatattcactctcttttaaacggaaagtaacaacatgagaatatgtaaagggagtgtctgtctatgctgaagccgtttgtgccccagcttgtttatattgaaccgagagcgctcgaatacccgttaggaaaagagctgaagaataagtttgaaaacatggggcttgagatcagagaaacgacatcgcataatcaagtccggaatattccgggaaaaaatcacttgcagcaataccggaacgcgaaatcaacattggtaatcggcgtccggaaaacactgaaattcgattcttcaaagccgtccgccgaatatgccattccgtttgcgacgggctgtatggggcattgccactattgctacctgcagacgacgatggggtcaaagccctacattcggacatatgtcaatgtggaagagattctggatcaggctgatgagtatatgaaagaacgggcgccggaatttacaagatttgaagcctcttgtacgtctgatatcgtaggaatcgatcatctgacacatacattaaaaagagccattgaacatttcggacaaagcgaattgggacagctcagattcgtgactaaatttcaccacgtcgatcatttgcttgatgcaaaacataacggaaagactaggttcagattcagcatcaatgcggattatgtcattaaaaactttgaaccgggaacttctccgctcgacaaacggatagaagccgccgttaaagtcgctaaagcgggctatccgctcggtttcatcgtggcgccgatttatattcacgatggctgggaggaaggctataaggaactgtttgagaaacttgatgcggcgcttgatgaagacgttcggcatgacatcacatttgaactgatccagcaccgttttacaaaaccggccaaacgggtgattgagaagaactatccgaaaacaaagcttgagcttgatgaagaaaagcgcagatacaaatggggtcgctacggaatcggcaagtatatataccaaaaagacgaagagcatgctttaagggaaacactggaatcttatatcgaaacctatttcccgaaagcgaaaatcgaatattttacgtaaggcggagctgtcggtacgacggctctttttttgctgcgccaaatggcggaaatgtttgatatttatttcaaggtttattcattttcttggccgaaagaccgatataactctcaggaggggatggttatgtttaaaaaaatgcacatcaaaattgctgtgtttgtatcggcaatgcttatcgtaacggttgtttttttaacggtttcttcatatttgacattaaagccgatgatgacggaggaagcaaaacgtacgacagagaatgtcaccaattcactcggtcagaacattgagcttcagctgaaaaatgatgagaccgtattaatgagattagcaggcggtgaattgtcccggtcttttttatcagatgggaacaaagaaaccgcgcggctttttaacgatgagttaaaacagatcggacagaatgacaaatatgtcgcgcttgcgtacgtcggaaccgcaaacaaacaaatgtttacatatccaaaggccgactttgccaaagactatgatccgacaaatagaacgtggtataagatggcggccgaaaaacccgataaggttgtctggactgacccttataaagatgcagtgacgggagacatgatcgtgacggcgtcaaaagccattcaaaacagcggaaccgtcgtcggagtggcgagcttagatctgaaactgtcctccattcagagcatggtcaacgagcaaaaggtaccatataaaggatttgcgtttttggcggatgaaaacggctctcttctggcgcatccggaaaaacagggaaaaaatatttcggaagatcagacgttaaaagacatcactgcggataaagaaggcatcaaagagctgcaggggaacatggtcgtctaccaaacggtaaaagaaacagggtggaaagtcggaacgcagtttgaaaaagatcagctgatgggagtagccgacaaaatgaacacggtgagcatttttatgtcactgatcgcccttgtgattacgatcggactcagctatttccttgcaaaaacgataaccgggccgattcagcagctgatcgcgaaaacaaattcggtctcagcgggagatttaaccgtccgcgcccggacgaaatcaaaagatgaagtaggcgagttaacaaaagactttaaccaaatggttgaaaatatgaaagagatggtcgaacaggttaaggcctcctcagaaaatgtgtctgatacatctgaccagctaaccgtcatttcacaagaaacaaatgaaacgagcggacaaatcgcaaaagcgatagaggaagtcgccgccggagcgacagagcaagcgtcagaggttgagacgatcaatgaaaaatcagaaaatctctcggtcaaaataaaaggaatcgcagatcgcgcaggcagcataaaacaactctcaaaatcttcagaggatgccagctacaaaggactggacgcgctcgggcagctgctgatgaagtcaaacgaagccaattcagaaacgaaaaaagtagaggcaatgctgaatgacctggaagaacaaacgaaaaacatagaagaagtcgtgacggcaatatccgccatttcagaccagacgaacctcttggcgctgaatgcgagcattgaagccgcaagagcgggagaaagcggccggggctttgccgtcgtcgcggaagaagtccgcaagcttgctgaacaatcagctctttcttccggccatatcagtgagacggtccgtctgattcaatcagagacaaaagaagcgtcacacgcgatgattgaggcaagcagaatgaatgatgaacaaaacagcgccattcatgaaacgggtgaggtcctcaatctgattacgacggaaatgcagtctctcgttcaaggtatagatcatatttacaatgacattcaaaaaatgagtgaagaacaagccgcgattcaagaagcgattcaaagcatctccgccatttctcaagaatctgcggcagcggcggaagaagtgaacgcttctactgatgaacagctcgttacgcttgaaaaagtgaagcaatcgactgatatgttaaagagcgcaagcgaagatctgatcagcgccatttctaaattcaccttgtaatgcggtctctatcagcctataatatggtaatatagacatgaaagaataatattatgaatcgcatcaggggaggaaagcgcagtgaacaaaacggtcggatttatcggtttgggcgtcatgggaaacagtatggcatcgcacattttagaagcgggctatcctgttttagtctacacgcgtacgaaacaaaaagcggaagagattctgaataagggagcggtctggcaggagacggtcaaagacctttcagagaaagctgacattattattaccatggtcggctatccgagtgatgtcgaggaaatctatctcggcgaaaacggcattctccggcacgcaaaagaaggggcgtttgtcattgacatgacgacatcaaaaccgtctctggcgaaaaagattgcggagaaagccaaagaaaagtccattcacgccttggatgcacctgtttccggtggagacatcggcgcgaggaacggaacgcttgccattatggccggaggagaaaaagaagcgtttgaagcatgcctgccgcttttctccgttatgggggaaaacattcagtatcaagggccggccggcagcggccagcatacgaaaatgtgcaatcagatcgcgattgcagcgggaatggtcggagtggctgaagcgatggcttacgctgaaaaatccggtctgaacccggaacaagtgctgaaaagcattacaaccggagcggctggcagctggtcattgtcaaatctcgccccccgtatgctgaaaggcgattttgcgccgggattctacgtgaaacactttattaaagacatgggcatcgcccttgaagaagcggagctgatgggagaagaaatgcccggattggcgctcgccaaatcattatacgacaagctttccgcgcaaggtgaagaaaacagcggaactcaaagcatttataagctttgggtgaaataaaaaagattgcccctgcgggcaatcttttttatttattttccgataaattgctgtgtccagatgtttcctgattctacataaccgacaccgatttgagtgaactcaggattcatgatgttctttctgtggccttcactgttcatccaagctttaacgacggcttcaggagtcggctggcctttggcgatattttcaccggcagttttataagtgattccgaaagacttcatcatatcgaaaggtgagccgtaagtagggctttggtgatcgaaatagtttttgtctttcatatcttgtgattttgcgtgagctgatttgcttaatttatcatcaatctgcagaggttttaagccttgcttttgtctctctgcgtttgtcaattcaacgactttcttttcgtacgcactgacagatgaaggagttttctcgctgctgttgtttgcgttatctgtctgttttgcattgtcagccgtctggttttgatcggctttcggtttttcggcagctgtcggatccgtttttgccggtgtttctttttgaacatttttaactgtcatgtcagaatgctttgcgtgtttttgcagcagctgagtcagttctttctcatttttaacgttcagctttttcacgctcgttttcatatgtagtttttcaacagcctcttgaagagtcagatgctgtacagtgtttccttttttcacggtaacgacgtgctggcatgacagctctttggcagatgcctgctgaatgcctccgaatgtaatcaaactgactgccgcggcagcagataagagaaatgcttttttcatagttaatagcctcccagagaagtttttttctacatgaaaaatcttatcacagcttttttgtcataatgcaggcagccatttcctttgacaacaaactcttgtcataattgtaattgagcgcagaaaaatggctctataccgggaaaaacgatctgtatttattttttaaaatccgttacatctcttcaaattatttgaagtgttagatatattttaagataatttgatcttgacagttttttttacccgttttcgctgtaacaacttttacaaaaatgttacaattaaaatctgtttatgtaaatatattcaatgatttgagaggtgtaacagaaagtggctgaagtcgcgcgcgaaccaaagaaaaaaacgaaacgttacagagcgctgagaatgaatctctattttttgattgttttccttctctttacggcactgatttttaaactcggcatcgtccagattgtcgaaggggataaacaccgccaggatgcggagaaggcaaatgcaaaaaccgcctattatccgacaccgcggggaaaaatgtatgacaagcggaacagagtggcggttgataaccaggccgtgcctgaaattgtatacgtttctacctcaaaaacctcggcaaaggacaaattgaaaacggcaaaaaatcttgccgcactgattcatattgatactgaatttatgaaggatcgaaatatcattgattactggcttgccgcacatccgaagaaggcggaaaagcttatgaaggattcagaaaacagcctgaaatcccaagaagtatacaaacgccagattgaacgcgttccgaagcaggagattgacgcgatcaaaaaaaataaaaaagagctggaaatcgcggcgatttatacgcgtttttcaagcggcaacgcctatcagccgcaagtcgtcaaatcaatggacccgaataagctgaacggaaacggaaacagcggttcactgcttgacgagcatgaaaacaacaagcaaaaaccaaaaagcgacctgacatatgaagaagtttccgtcgtatccgagcacctgaaagagctccccggcattgacgtgatcaatgactggacgcggaaatatccatacgacaaaacgctgtactctctgttcggcggtgtgacgacaccggaacagggattgttgggcgaacggaaagattattatgtcacaagaggctactcactgaatgaccgggtgggtaaaagctacatcgaatatcaatatgaagactatttaaacgcgcataaagaaaaagtagagtatgtggaaaacagcaaaggtgaggtcgtcagccaaaagcccgtcgatgaaggcagcagaggctacgatcttcagctctcgctcgatatggaattacagtcgaaagtcgaaaaagtcattgaaaaagagctgagaagaagccgcgccgcaggcaactttatggttgacagaggatttgccgtcatgatggacccgaacaacggggatattctctcaatggcggggaaacgcatcgatctcgaaacaaataaaacacaggattttgcgatcggagcatttacgacccaatatgagatgggctcttctgttaaaggagcgactgttctcgcgggttaccaaagcggcctcccgcattataaaacgtttgtcgatgcaccgcttgtatttaaaggcaaaacgagaaaacaatcgtggacacaaatgggagccattactgagctgaccgcgctgcaaagaagttcaaacgtgtatatgtttcatgtggccatgaatatcgcgggcattacctatgtcccgcacggcacgctgcctgccggattagacgatattaagaaaatgcgcaactactacgcccaattcggcctgggtgtgaagaccgggattgatcttccgcaggaatcagcgggcatgcagtcaaatccgcaaatggtcgggggattgctgcttgactttgcgatcggacaatttgatacatatacgccgcttcaaatggctcaatatatttcagccatcgcaaacggcgggtatcgcgtccagccgcggatcgtcacaagcattcatgaaccggacagcaaaaataagattggaaaagcgattgaacagcgagatattaaaattttgaacaaagtaaataacagtccgagcgattttgatcaggttcataaaggaatgaaattggtcacaagctcacctcaaggaacggcttattcaacattccaaggttccggcgctgatgtttccggaaaaacgggaaccgcggagacgcactattacggcacgaacaaaaactggtgggggaagtacacgtataacctgacctttgtcggctattatccgtcagaacatccaagagtggcattcagcgtcgtcgttccgtctgttcgaaatgataaagatcatgtaagcaaaaacattgccaagggagcagttgacgcttacaaagagcttgaaaagaaatacaataaaaaataacaaatgaaagggcggccgaacatctcgtgcgccctttctttcattcaggaaaattgacgttcacaataagaatagaaggagaatgctcattttttagcgaatcaatctagtggaatttctttttatatcagtccgtgtccagcctgcagtgcgagtataatgcaaaggagggattctgtggaacaggatactcagcatgtcaaacagtttcaatcgaaaaccgatcttcatgccgttttgacgtctaacgggcgtattatgtatatttctgcaaactgcaaatcgtacttcagttattctcaggaagagatgatcgggtcatttctcaaaacgttcctgcatgaagaagatcaatttttggttgaaagttacttctataatgagcatcatttgatgccttgcacctttcgtcttattaaaaaagatcataccatcgtatggcttgaagcgggtgtggaaattgtcacaccgcaaatggaggggacggatcgggaaatcatcctcaaaatcaaggtgcttgaggagaagacgccccgccggccttatatgtatgaacaaaagaagaaaaaggcagaacaacagtcggaagatgcggctggaaacggcgaattcgagcgtcttgtcgaaatgctgccgaatcctttatatgtcagcatcaacggcacaatcgcctacgccaacaacgcgatgcttgccatgctgggagccgagagcaaagacgaggtaatcggcaggcgctcttatgaatttattgaagaagagtatcacgacattgtgaaaaaccgaattgtgcggatgcaaaaaggaatggaagtcggaatgatcgaacagacgtggagaaggctcgacggcacgcccgttcatttagaagtgaaggcggcaccgacgacatataaaaatcagcgggcggaattgctgcttctgattgatatttcttcacggaaaaaattccaaacgattctgcaaaaaagcagagagcgttatcagctcctcattcagaattcaattgatacgatcgccgtgattcacaatgataaatgggtattcatgaatgagtcgggcatttcgctgtttgaggctgaaacatatgaagatttaatcgggaaaaacgtctatgatcagcttcatccctgtgatcatgacggcgtgaaacagcggatccaaaatattatcaaccgaaagaccgagtcagaaattattaagcaatcgtggtttacctttaaaaaccggctgatctacacggaaatggtctgcattccgacgacgtttttcggagaaacggccgtgcaggtcattctgcgtgacatttctgagcggaagcagacggaggaattaatgctgaagtcggaaaagctgtctatcgcagggcagctggcggcggggatcgctcacgaaatccgcaatccgctgacggcgatcaaaggatttttacagctcatgaagccgacgatggaggaaaacgaacattactttgaaattgtgttttctgaactgagcagaatcgaattaattttaagtgagcttttaatgcttgccaaacctcagcaaaacgccgtgaaagagcgtgttaacttaaagaaaattataagtgaagtgaccgctcttttagagacgcaggcaaatcttaaagggatttttatcaaaacggattacgaacatgacagcatgtatattaacggtgatcaaaatcagctgaaacaggtgtttatcaatctgattaaaaatgccgttgagtcgatgccggatgggggaacggttcacatcatcatgacagaagatgagtattccgttaatgtgacggtgaaagacgagggtgacgggataccggaaaacgtgctgaaacgaataggcgaaccgtttttgacaacgaaagaaaaaggaaccggcctggggctgatggtcacattcaaccttattaaaaaccatcagggagctatccaagtagacagcaaaccggatagaggcacggcctttcatattacattcccgaaacaataaaaaacaacggcgttatgccgttgtttaaatagtctgcatggattctctcgtttttaaaataaatgcttccagccggtccaagccttctctcaatgtatccagtgaatatgcgaatgacagcctcacatacccttcacccaactttgaaaacgagctgccaggcacaagagccacacctgcatcctctaaaagagccatactaaaatcaaacgatgacattccgaatgacttaatggaagggaagatataaaatgcgcctgacggctttacgacgtcaagccccattgaaacaagacggtcatatacatagtcaagccgctttttatactgttctctcataataagcgcatcatcaacaccgtttgtcaccgcttcaagagccgctttctgagagattgaagacgcgcatgtcacactgtattggtgaacttttaagatgtgcttggcaatttctttcggtgcgaaaatgaaaccgattctccagcccgtcatgctgtgtgattttgacaggccgttgatgacgatcgtctggtctctcaaataagacgcgatcgaataatgcggtctgtcataggttaattcgctgtaaatctcatcagacaggacaaaaacatttctgcccttcaggacggctgcgatgttttgcagctcttcctcagacaatgtcactccggtcggatttgacggataaggaagaatgacgcattttgtttttggtgtcagcgattcttcaatgagccgcgccgtcagcttaaatccgtgtgtcgtcgtatccacatggaccggaacggcgcccgacatgcggatgatcggttcgtagcccggatatatcggtccggggagaataacttcatcgcccggagataaaatcgtccgcaaagacgcgtcaatcgcttggcttgccccggttgtgacgatgatttcagtttcagcttcataattcaaatcagcttttttcttcatataaagctgtacggcctgtctcagctcaaggccgcccgcattcggagtatatgccgttgcgttctcgtcgattgcctttttggcagccgctttgacatggtgcggcgtgaagaaatccggctgaccgatcgtaagcgaaatgacattgtcgtgctgagctacaagatttgagaatttgcgaattcctgaaatttcaatttcttttacattcggattaagcaaatgttccataattcatcaccttatactatatattgagtttctcctattttaccactagctgagcatttgtcatctttttattgaactatcccgagtatatgtccgatatgtgaaaacataccttctttcagaaaaaaataagacaaccagctgaaatgattgtcttcattgtatcatgatctatctattgtgatatgtggcgaatgtcattaatacccgtattcaaagctgacgtcttcccgccataagatgtatggagcgggcttgtcgggacgctctttcgcctcttttttcatttgcaggtaagccgttttgctgatatcttctaacaccgtcatttgatcttggtcgaatatgactactgtacccatttattacacccttcttcctgaaaaatccttgactattttaccactcgatgtcaaaaagtcaatgggatatcagaaaaaagcatctttttataaagagttcatggccagttggcccgaatacattcactttttccgtttccagccgatatatacagtacaatactgaatgcggatagcgagggattgaattgtctttacaacaatacgatattttattggattcaggcacaaacgaattagaaatcgtcaaatttgaagtaggcgtcaatacatttggcataaatgtgatgaaagtccgggaaatcattcagccggtagatgtcacatctgtgcctcagtctcataaagacgtagaagggatgattaagctgagaggcgaaattcttcccgtcatcagtctgtatacctttttcggcgttgatgccgaaggagcaaaagacgataaatatatcgtaacggaattcaacaagcggaaaatcgtctttcacgtcggttccgtttcacaaatccacagggtgtcctgggaggcgattgaaaagccgacttccctgaaccagggcatggagcggcatttaacgggaatcatcaaactggaagacacgatgatctttctgcctgattatgaaaagatcatttatgatattgaatcggcatccggagttgagacttatcatgtccatcaggaaggatttgatgaaagacgggcgggtaaaaaactgatcatcgttgaagattcgccgcttctgatgcgtcttttgacggatgagctgactgaggcgggatacagtgaaatcgttacgtttgaaaacggaaaagaagcgtatgattacgtcgtggaactgacggataacggagcaaacctgtcagaccatattgatatgattatcagtgacattgagatgccgaaaatggacgggcatcgtttgacaaagctccttaaggataacccgcaaagctctgatgtgccgattatgattttctcgtccctgattacggacgacctgcgccaccggggcgaagtcgtcggagcggatgaacagatcagcaagcctgaaatcagcgagctcattaaaaaagtggatacgtacgtgattgaatagaaaaaagccgatgcatgacgcatcggcttttttgcggcggaattaaaaataactctcaccaagttttttaaatacgggtttatgataagcgggctgctgcctgttggcggcaagcggtttttcctttaagcccacatatttttgcaatacgtttttcgcttttgtcaaagacatttgtgctttaggattacggtacgattgatttaacgtacctaaatgcggaagatgctggaagtcttcttttgttggaggcatgtgaaaatagtagtctccgatagagataagtacgtctgactgctgttggctaaacctgggattatttgaaaagtgaagccctatttttttccctttgccttctttcacaagcttttgtaatgcccgttttttcagcagataaaggtatttagggttgggggcggtttttgcatggcggttcacagtataaacagcttttgaaagattctcgatggttggctgcagctctttcgaataagcgtggtcgtccattatttctctcctttgcattgatcaagttcatatatagattatacttttttagcgttgaaatgcaaatattgattataaaaatacgcctttttctgatgaaaagggcgcatttttttcctttattagacaggattcgcatgtttttcagaatcagcctttaatgattgttgcacatcgacctctgctgcctcggcgctgtatttcggaagagcgataaaatagaacacaaataccgctaaaatcacgattcccatgccgtaataaaggtaatcaatattggtaacgaatttcggaaataacagggcaaccagtccgagtgtaatcgattgggcaaacatcataaaaggatcctgccagccgctgacccggcccattattttcggatgaacgattttcggcatccagccgccgatggcgatattgacagggccgatgcacatgccgaggacgaaagccgccgcataataaatccacagcttatccgtatagccgaggacaaaaatgagcagtccggctgccaaaataggaatcgacatcaaatgatgcggtttgactttttttgcgatcatcgttccgatcacacttcctgcaagcaggccgaagccgagtgcgacggtgaagatggaagtatgtgattcgtaatgatcaggcgcaagtccgtatttcatcgtaaacatcggcagtacggcaaagccgccgttgacaaaaccaaagataaaaaagccgaaaataagggaagcaagcaatttgtttttaacaatatatacgatcccttccttaaaatcagcgaccgagtctttcagaaacgaatctccccatttaaaagggccgttcggctgacgggcttctttcggaatgcggcacgcgcggatcagaaagcctgatacaataaagctgacaaaatcaaggataatggctccgtgaataccgatcgttttatacataaacgcgcctataccgacaccgaataccatgaagatgctgaacaggatctggttaagtcccgccgctttcgcgtaatgctccttaggcagaatagcttgtacaaggctggcttccgccgggaaaaagaacttggtcacggcgcttctgatgaacaaaatacagaacacgagagggatgctcccggtgtataatgcggcaaacaatacgatcgtcagtccggctctgatccagtcacaattctctgcgacctttttcctatcaagccggtcagctgcgacaccgacaatcagaaatacgaaaactgtcggcagtgaatacatcagctcagccaaagtcgtgtatgccggctggtttgaaaaatggtccagcaagtaaaaagcgaaagccatattacctacagtcgttcccatttgagaagcgagtgctgcgaaaaagagacggacaaaattgcgatttttaaatatatccataaacacgctccttaccctaaaggtcccactgtaatatattatcatcagctcgttccattaacaaataagatctttctatcttataatagtcacccttgttccattaggaacggcagcggcaagttcagtgacgtcctgattatacatccggatgcatccttttgataccgctttgccgatggaggaaggattatttgttccgtgaatgccgtaatgaattttagagaggctgagccaataagcgccgaacgggccgccgggcttaggctggcggttcacgatgtaaaattctccggtcggcgtggtcgtcaatatttttccgactgcgatgggatacgtacggatgagcctgccaaggcggtataactccagtttcttcgctccgatatacacgatgatggagtagggaatggtggatgggtcgggaagattcggtatgataatatgctgtcccgcgtatatgaccgattggattgagggatttgcctgaaggagagcagcagtgcttattctgaagtcttgcgcaatgcttgagatggtttctccttgtttcacttgatatgtcagcagtttcatcaccctcctttttgctcttttccatatacatattacggagggggtgtctgtgcatcaggataaaagtcttatttttgctcggttttcaatgtgaacagcgtgatttccggtctggctaaaaatcgatacggcagtcttgtcgtaccgagcccgcgattgacgtaaacgcctgtgtcatgcagcgtatacatgccgtcggtatacgtttttccgtaaggaggcgtaataagagggccgaaaaacgggagctggacctggccgccgtgagtgtgtcccgacagctggaggtttacgggatatccgcctatcttgagagcggcatcaggctcgtggacgattaaaatggaaaacgcatcttcggaaaggcgtgacagggtgccttcataatcgggttttccgagcattacatcatccaaaaacgcgaattcaatccggcttccatctgtcagctgcacctgacggtagccgtttcgaagcacttgaaaatcagccgcttccatcagagccttgtacgtgttcgtaccgtagcctccgtggtcatggtttccgtaaacacaaagtttgccgaagggagcttcaagattttgcagcacggcgagtgcatgctggtgatcattaaataaatgcggcttatcaattaaatctcccgtaaagatgagcagatcgggtttcagctgattgatcttttccgctgctttattcaagtcaccggatgtaaacacatcactgagatgcgtatcgctgaattgaacgattttaaaattgtcaaaaccgcgggggatcaggcggctggtgattgtatgccgggtgatctcaatcatgcgcggttcaatataccgggcatagccgtaacctccgcaagccattgcgagagctgtacccaaaatgccgaatcctctttttaaaaatgttcttctggtcattttctccatatgtaaaaccaacctttgtcagagttgttctattatatcatcagcttggctgaaaaatcccttctcagcatgtaatgacgcggaaagacatctgtgataaaattatgaatgattattcattcaataaaaaggggtgggtttgttatggataagaaagcggtaatcattacaggcggttcaagcggcatgggaaaagcaatggcgaaaaaacaggctgaattaggatggcacgtcatggtgacagggaggaaccatgaagcacttgaggaaacaaaaaaagaaattgagacctttgaggggcaggtcgcctgttttcaaatggatgtccgttctgattccgccgcttcagacatgattacagaagcgaaaaaagtctttggccggctcgatgcgctgattaacaatgcggccggcaactttatttgcccggcagagaagctgacacccaatggatggaaagctgttattgagattgttttaaacggcacatttttctgcagccaagcagcggcaaggcattggatcgagcaggagcagaagggcgtcatcttaaatatggccgctacatacgcatggggagcgggagcgggtgtcgttcattccgctgcagccaaagcgggggtattgtcactgacaagaacgctggccgttgaatgggggagcaaatacggcatccgcacaaacgcgatagccccaggcccgattgaacggacaggcggtgcggagaagctgtttgaatcggaaaaagcggtgtcccgcactatgaacagtgtgccgctcggccggctgggcacaccggaagaaatcgccgcgttggcagcgtttttgctatctgatgaagcgtcctacataaacggggattgtatcacaatggacggggggcaatggctgaatccttatccgttttaatttttcatatattgattattttgcaaaacaagcgaacgttaaagccgccgttcgcttgttttattttctattcaaaattatgatataattttgaaagattaaggggcgattaattgaagaaattattaaaatggttcgttgtactatttgtaagcagtttcgttatcatctttaatatttggtactttattatttgtgcttttactccggagtattatcaaaataccaatcttacatctgatgaaataatcagatttgaaaagctatatcacatcgattttcctgatgaaacgaaatttattaaagccagggagtatttgagtgggctcggaggcgatacatcggctgtattatatgtgtctctgccagccaagctggcggaaacaattttatctgattacacgtatatgccaataaatcatactgatactgccggttcaatgtatggagttgacgtttccgagagtgttggcgggttaacaactcttacatttggcactttagataaaaaaggaactttctttcagttgaaacatgatgatgattggatatttaacagcactgattggagccattatttttggacagctgccggttataatgctcttatatttatccttttatttgtgattgtgaaacaaatgaataacgtccttaattaaccggtctgaagagtgatcttaaaaatgtcccccttttattttaagctgcggccatactgcctccttttcccctaatctaaacatttgtggtgctgatataattgtgtataatcagacaaagatagagaagcaggtgataacatgttggacccacttgatatactgacgaatattgatgatgtcattccgtattaccaagcgatttttaacgctgaggaacaaagagtcgtaggctacgaagtgcttgggcggattttggcagatgcggagattgagagcctcgggccgtttttcttagattccggcattccggaagaatataagcttgaggtcgatgacagagtcatcaggcaggcgctggagcggtttaaagaagctgaccgtgatctgttgatttttatcaatcaggatgcgaatgtattgatgcttgaccacggcgaaagctttcttgagcttttgaaagaatacgaagagcagggcattgaattgaaccgtattgtgcttgagatcaccgagcacaatttcgaaggcgacattgaacagctgtaccatatgcttgcctactatcgtacatacggcattaaaatcgcggtggacaatataggtaaggagagcagcaacctggacagaatcgcgctcctttcaccggaccttctgaaaatagatttgcaggcgctgaaggtatctcagccgtcaccatcatatgagcatgtgctgtacagcatttcattgctggcgagaaaaatcggcgccgcgctgctgtatgaagatatagaagctgatttccagctccagtacgcatggagaaacggaggccgattttttcaaggctattatctgcaggcgccgagcggggattttatagaccggagcctgttaaaagcacgcttgaaaacggagtttcagcaatttatcacgagagaaaaaaagaagctggaaacggtatatgaacactctgagaatttttataagcgggtcaatcaggcagtttccgaactgaagaaaacccatcaggcggacgatgagtttattaaaaaactggcggaaaacctgacggactgctgtttcagaatttatatgtgtgatgaagaaggctatcagctgacgggaaatgtgttcaagcagtccggcgaatggctttatcagcctgaatacatggagaaaaactggagctggcgtccgtactttttagaaaacatcatgaagatgcggaattcaagaaaaggttttttcagtgacctgtacagtgatattgagacaggtgagatgatcagaaccttttcatacccgatggatgacaatatgtatttatttatcgatctgccttactcttatttatatgaacaggacgggttactttaaagcggctgctgtatgccgctttttttgttcatttgaaaaaagttttaaaaaacgattgacaatgatactgataatcattatcatttagttatagagagaagttactctctgttccccaacccctctatcagatcaagatccgaaaaaacttggcgctacccccgccaagtttttttatgctgtctcctcataaaagggcttctccttacatacatctgataatggcggctcaaaaagcgaaaaattatttttgaaaggtgtatgacattccgaaaaaagcttcaaactattcgaaaacacggttttcccgtttatttctttttgaaaatccagcgggaaaatgccatcccggtctactttatggtatgatgctctgtagaacttgtattataataaatacttgttgatttgaagttgttttttgaaaggagtctttttttagaatgtcacaattaatgggtatcatcacgcggctgcaaagtctgcaagaaacagcggaagcggctaacgagccgatgcagcgttattttgaagttaacggcgaaaaaatttgcagtgttaaatatttcgaaaaaaatcaaacgtttgaactgacggttttccaaaaaggtgaaaaacctaacacatatccgtttgataacattgacatgatttctattgaaatttttgagctccttcagtaatttgatttgatttttcaggctgaccaagcttccggtcttccgcaagcggagctttattaaattatgcaaaggaacgtgcttgttcgtttggttgtagactctggaaagaggagtgtccgtacatggctgattcttttctgttttataatctttctgaggcacagatgacctttcaagacgtgacggagcggctgaaacgctttgtcaataaagacccccgttcagcatacgtgctgtctgtagggactgattcacaagtttaccgcgacttcacaaagtttattacggctatacacttgcaccgtacaggcaagggagcttggggctgtttgaaaaatcatgatcttgcaagaccgatacatagccttcgcgaaaaaatttcgctggaaaccgcattcagccaggagatggctgcgcatatcctcgacggccgtcttatggaactgacagatttgctcttgccttttacggatgaaggggcggatctttcatttgaagtgcatctggatatcggtcaaaaagggctgacaaaagaattgatacaagaaatgaccggccgcattacctcgatgggcattgaagcgaaaatcaagcccgattcctgcacagcattcagttatgccaatcgttacacaaaataatatttcatacagaatccgcaaaatgtcgaattatgcggttgacgatttttttctgtttacttattctagcggtagagctgaaagcaaatttcaccttgctttcggaggtattcagttaaaaatagggggcctgattacgtatgagtcttatcggtgaacgatttacggaagaagaacagaaacttctgctgaatatcctgatcaatcaagaatatgccattgagcttttgaccagcgaaatcaacgatatagaagcagggtcaaaaagcgttgatggaaccacttataaaaaactcgtaacgctctatgaccgttttcggaatgaaaattaatcagcggcctataaattgatactcgattgcaaagagtatcttttttattgacggaaacttttcgacaaaaaatgataatgtttatattattgcaatatagggaatacatgctttgatgaaaaatgtaaaggggtcgaagtgacatgattagcttacaatcagatcagcttcttgatgcaacagtcggacaatttatgatcgaggcggataaagtggcgcacgttcaagtcggaaacaaccttgagcatgctctattagtgctgacgaaaaccggctataccgccattcccgtccttgacgcttcgtaccgtctgcacggtttgatcgggacaaatatgattatgaacagcattttcggacttgaacggatcgagtttgagaagctggatcaaattacggttgaggaagtcatgctgaaagacattccccgtctccacatcaatgatccgattatcaaaggattcagcatggtcattaacaacggctttgtctgcgttgaaaatgatgaaggcgtctttgaaggcattttcacgagaagagtcgtgttaaagcagttgagcagccatatcagatcattgaataagtaggctcgcacgatcagcctatttgttcttttgcatgccggaaaaagaaaacgcatacatatgagtggcgcttgcctcggcagcctttattttattagaatggtagataagaaatacgaaaaggcattgaaaaggaggacgacatgcagcttcaagagcttcatatgctcgtagttttagctgaggaattaaacatgaggaaggctgccgaacggttattcgtgtcacagccggctctgtcccagcgattgcagaccattgaaaaagcctggggaacaaagatctttcttaggtctcaaaaaggacttacggtgacgccggcaggagaaaaaatcatacaatttgcaaatgacgtcacggatcggcaagaaagaatcagagaaaacattgatgaacttgagggtgagattcacggcacattaaagcttgccgtcgcctcgattatcgggcagcactggcttccgaaagtgttaaaaacatatgtggaacgatatccgaatgcaaaggtctctctcattacagggtggagcagcgaaatgctgaaaagtctgtatgaagatcaggtacatatcggcattatccggggaaatccggaatggaaaggccggaaagattatttaatgaccgatcatttatatttggtcgatacggaaatttcctgtattgatgatattgcccataccgaccggccgttcatccaattcaaaagtgacagtacatattttcaggaaattcagcattggtggcatcaaaaattcaaaacctcgccgaaacagaccatccttgtcgatcagattgaaacgtgcaagcagatggcgctgcacgggatcggatatgccattctgccgtcagtcaccttagaagaggaagacaaagtaaataaaatgcccctgcttgatacaaaagatcatccgatcggccgtgacacatggctgctcggttatgagccggcatttgaattaaaacaggtgcaggcttttgtttctgtcattaaagatatgctgaagcaggaacgcccattttagaaagacagcaatcatgctgtcttttttttattttttattgacaatgaaaatcattatcatttaaagtgttatatatgttaatgaaaatcattatcaattacgaggtgatcatatgcaaaaagcattaatgatatacgcaagcatgtcggggaatacagaggatattgccggcattataaaagaaacactgagcgggcatcagatagcagttgactgtcttgacatggacgaagcagatgcggattctctcgaagcatatgattatgtttttgtcggcacgtatacatggggggacggtgatcttccttacgaagcggaagatttttacgaagatattctgcacagccagctcaacggactgaaaacggcctgtttcggttcaggcgatcacgcctacccgaagttttgcgaagcggtcacgctgttttgcgatgcgtttgaacaggccggagccaatttatatccggaaacgctgaaaatcgagctggcgcccgagacggctgaggatcaggaatgctgcaaagaatttgtccgcggttttcttgcatgggccgctcaccacggagacaagtgccatgtttcataaaggcgcgacggctgtcatggcatcagtatcttcgggattttttgtcgctgtgaaaggcgaaggtatttttcatttttcggcggaagaaggctggaaaagactattccgagtgaaaagcagaatttatgtgctgacttacatagggccctacatattcgcggctggagaaaaaggcgccgtcctcagatcagccgatcagggaaagacctggacggcctcccggtttccgaccagcgcctccgtatgggccgttgccgggcggaatgacgggtttgtctgtgcgcacggcacatactgcctctacttatctgatgatttcggcgtcacttggcatgtggctaagcccttttcacaattaaaggagccgcctgtcatccgttcgctttgtttacacggtcagacgatttatatcggcacccgaattcatatgaatcatggcggcatttgggcgtatgatctgacggaagaacgcatccggcgtataatccgcgaaaggcagcgcatgacggcttcaatgatgatgtatcagaatgactggctcattgcagcaaagggcgcggcaaagggagaacggggggaggttgccgtccgaaacgtgcggacgcaagaggagtttgccattacagccggacccgccgtacgggaaaaatcatttctcgacgtttctgaggataacgggattatttatgtcacatcgtcacaggacgaaaacggattttcgcgtatttatcaagctgatctcgccgccggtgaattaaagtggtttgatacgatccgcggtcacggatggcgggtggctaaccgggaagaaaactttttttgcgcgggcctttacgaaagtaagtttgtcagaccgtatgaggcggttcggctcgcacattagtttttatgcataaaggagagacgaagatggggaatgtattgcttgtttacgccacaatgtcaggaaacaccgaggcgatggcggatttaattgaaaaagggctgatcgaagcacaagcatccgtagacagatatgaagcgatggatattcatgccgaactttttaatgattacgagtatattttattaggcacatatacgtggggagacggggatcttcctgatgaaatgctcgatattgctgaagatatggaaaacctggagtttataggaaaaacatttgctttgttcggttccggagatacgtcctatgagtttttttgcggagcggttgacgaattggaaaaagtaatcacagcccgcggcgggcgggtggtgctgccgtcggtcaaaattgaaaacaaccctgagggcagtgaggaagaagagctccgggaattcggaagacagtttgccgcgctgtgcagccagccggcagaataaaggcttgttcctttttttcttgtctttgtatccttcctttgttacagtaatgaggtagaaaatcagaggaggacaatacatatgaaaatgatggatgcaaatgaaattatttcatttattcaaaatagtacaaaatcaacgcctgtaaaagtgtatgtaaaaggcgatcttgaaggaatcagctttggcgattccgctaaaacattcctgaacggccaatccggcgtcgtttttggcgagtgggctgaaattaaaagcgcaatcgaagaaaacaaagacaaaattgaggattacgtcattgaaaatgaccgccgcaactctgcgatcccgatgcttgatttaaaagatgttaaagcgagaatcgagcccggcgctattatccgcgaccaagttgaaatcggcgacaatgccgttatcatgatgggtgcatctattaatatcggttcagtcatcggcgaaggtacgatgattgatatgaacgttgttctcggcggacgcgcgactgtcggcaaaaactgccacatcggagcgggttctgtattagcgggcgttattgagccgcctagcgctaagcctgttgtcgtggaagacgacgttgtgatcggcgcaaatgcggttgtgcttgaaggcgtaacaatcggtaaaggcgcggttgtcgctgccggagccatcgttgtaaatgacgtcgagccatataccgttgtagcgggaacacctgcgaaaaaaatcaaagatatcgatgaaaaaacaaaaggcaaaacagaaatcaaacaggaattacgccagctgtaaggaatggtttgatagaatgggcgtggatgataaaatccacgccttattcttatctcaaggaggaatacatatggaaaaagagcggctcattgccatccgaagagatctgcaccgcattccggagatcggctttcaggaatataaaacccaacagtacctgctgaatctattgaaccaatatccggaggaaagaattgaaatcgaaacttggagaaccggcatctttgtcaaagtcaacggcacggctccggaaaaaatgctcgcctacagagcggatatagacgctctgtcgattgaagagcagacggggcttccgtttgtatctgaacaccccggttttatgcacgcatgcggccacgatatgcacatgaccattgcgctcggcattattgatcattttgtccatcatcccgtcaaacatgatctgctctttttattccaaccggctgaagaaggaccgggcggagcggaaccgatgcttgaaagcgatgtgctgaaaaaatggacgccggatttgattaccgctctccatatagcacctgagcttcctgtaggtacaatttccaccaaaagcggattgctgtttgccaatacgagcgagcttgtcatcgatcttgaggggaaaggcgggcatgcggcatatccgcatacagcagacgacatggtcgttgccgcgagcacgcttgtcacgcagctgcaaacggtcatatccagaaatacggatccgcttgacagcgctgtgataactgtcggaacgattaccgggggcacggcgcaaaatatcatcgcagagcatgctcatctggagggaaccatccggacgctttccgaggaatcaatgcgtatggtgaaaaagcggattgaagagcttgtcaaaggaattgaaatcggcttccgatgcaaaggaaaagtcacgtatccgtccgtttatcatcaagtttataatacaagcggcctgaccgaagaatttatgcaatttgtcagcgatcatcagcttgctgacgtgagaacggcgaaagaagcgatgaccggagaagatttcggctatatgctgaaaaaatatcccggctttatgttctggctgggggccgattcatcccacgggcttcatcacgcaaagctgaacccggatgaagatgcgatggaaaccgcggtaaatgtcatggtcggatatttttcgaagtatgccaattaaatccgaaaagaagaataatctaacaaaaattgagcattctacataacggaggtgttcaatatgacgaaaaaaattggaattgaacaatctttatcggatgtagaacaggcgttaaaacaaaaaggatatgacgtagtgatgatgaagactcctgaggatgcgaagaattgtgactgctgtgtcgtaaccggacttgacagcaatgtccaaggaattgccgatacgtcaactcaggctcccgtcattacggcttccggaatgaccgccgacgaaatctgcagcgaagtggaaaaaaaatttcattaaaaagaaaaaaccgaagcttacgcttcggtttttctattcggcggaagcggcgtttttaaaacggtcgagcgcgatttttatttctctccgcagtacgcgttcaacccgccattgctccatattttctgttttggcaatgattctgatcaccatttctgacgtgcttaaatcctgaaccccgatgacgtccggcccttccttaatctgcgggagctcagcggctgctttgtcacacgcggtttgcaggatttgaatggtttcatcaagatttttttcaagcggcactttaatatcgacaagcgcctgcatcgttccgcgggaatggttgctcacattcgtaatgccccggttgggaagatagtgaagcgtgccgtcaaagctccggatttgcgtcgtacggagaccgacctgctcgacaatgccgctgtagccggcaaccgtaatataatcgccgacgtcgatctgtttttccaaaaggataaaaaatccggtgacgatgtcactgacaagcccctgagccccgaagccgactgcgagaccgaccacgccggcgccggcaatgagagcgctcggattgtagtgaaataaatccaaaatcatcacgataaaaacgaaaatcaagatgtatccatatacattaagcgcgaggcttcgcaaagtataagcgcggcctgtggagaggttgttttgttgctcgaatttctgaaacagatgcttgatcagcttttttcctgccgcccggaaaataaagtacgctaaaataatgagagccagctttatgatgaaaatcccggcagatgtgagaagcccggcccagtcaaagtgttttaaatcaatcatagtgatgtcttcctttcaagtctattgcagaaaaagctaaaagtgatatacccgttttttaaaaaaataaaccttttaatagaaaccagttatttcatttatgatttgttcatattgcccggtttcaatatcatcatttttgtgaagatatgaactaaggaatcgccacactcattttaacatggtgattcagccaaatcatatcctttggagggaaaacaggagaacgttgcccggcggaactgaaagccccggcaaaaaacctttttcataaggagggaaataagatgaaattacgtcagcaaatgcctgaattgacaggcgctaaagcatggattaacagagaagtcacgaaggaacagctggtcggcggaaagccggcactgattcacttctggtccgccagctgccgcatgtgtaaagaagcgatgcctgagatgaacgaatttcgtgataaatataaagatcagctgaatgtggtggccgttcacatgccccgttccgaagacgatcttgatcttgagaaaatcaagaaaacagcggctgaacacgatatctctcagccgatttacgtcgacagcgatcatacgctgactgaagcatttgaaaatgaatatgtgccggcttattaccttttcgataaaaccggacagctccgccattttcaagcgggaggaagcgggatgaaaatgcttgaaaaacgtgtcagccgagtactttcagaaacggagcaggcttctgagtaatcgggacaatctccgtcggactattgtctcggttctgcaaaccctttgccgtttaggtaacagggtttttttgtgcttattggataaaaaattccaatatggcatgtgtggcttaaaaaataagagaaacagccgtaaacacgctgtaccgcttgttttatcgatatcattatcttttacatattatagtcgaaaattgtagatatcacgctaattttcattaaacaagtaatttcaagttatattttgaaatggttgaataaattggaactttgtccagaatcccctatatgataagggatttttgtatataaagtaccattttcagaaaataagcaatttttcatagagtaaataaaatagtaaaatgataaaataatagttgataaaattacttttgtaatctaatatcttaataaaagcgtttaaatttttgacagggggttttacacatgtttaatgaaagagaagcgctgcgcttacgtttagaacaattgaacgaagcagaggtaaaagtcattcgtgaatatcaaatagaacgtgataaaatatatgcaaaactgagagaattagacaatacaggcagcctgtccgatacaaaaaaagagtttcgtccggagaaaaaaagtgactctctcccggtgcttgcagagcttgcagcacaggaaatgagaagctatcaaaagccgcagacacagcctcaatcctcccagccgcagatgcagtctattacgtctcttcccgccggcattccagacggttctacaagaagaagaagagggacggcgagaccgggatcaaaagcggcaaaactgcgcgaagcagcgattaaaacattgaaacgccacaatgcagcgattaaaagttccgaactgcaaaaggaaattgaaaaggaaagcggccttgaaattcctaatatgacaacatttatgcaaagcttaattaaaatgtatccggaagtgaaaaaaccataccgcggccaatatattcttgagggagaaatttctcaggaaacagcagaaacggcaaatgatacggctgctgaataaaacagtaaaaactgcttgcgttactcaagcagtttttttgcgctttcccgcttattctgcggaagtgacgcatcttttccaggttttttttcaagcttgacgacatatttttggaaaggcttttcgccgtcagcacgttctttcaacgcatccagtttttcatcaaacgactgatcgcgggactctgattgtacaaattgtttttgcagggagatgacttgttcggtaacggctttaagcaagtcttctgcctgaacggtttctttggaaacagaagggatttccagagcttgttccgccggtttcgccgtgcggctgtcaatatcagcaaaatggccggcaatccaagcatcactttcgtccagctgccgtttatatgaaagaatggtttcttgaaataacttttctttcgttttttctatttctacaagccgttcttttgtttctagtattcgatctctcatatgattaatttctattttaatatgtttgagctggtattctttttctatcatttgtgtttgaagccgggtattttcgtctgcagcggcatgataacgctgtttcatatcttcgtgagaagtccgttcagtttgaatggcggtctcaagtgagcggatgcgggtatgtaagtttttattttcttcttcaaattttacatttgtaagatgcagacggtgcttttcttccatctcatttttccgccgaaacgtttcctgctgaagcagttcttgcagaatgacgattttatcgagcagcccggctctgatttcatgcaaagaacgttccgtgtcacttgtctgtttgtgtttttgagccatggcttccaattcgtcagaaagcttgtgaagccgctctttaatattggcgttttcctcctgaagcttattatttttctgatggaagtagcttgcttcaaattctgaaattaattttctgcatctggaaagttcagatttcaagtaaaggttctcttgagaagtgtcgtggaaaaacggaccggatattttcataagaaccatctccctcatgatgttaacactacaatatgggaaaggatcaacggctattcctcttaattaaacagacaagcaccgtaatattgtatttcggctgaggcgtttgctatgcttttatatagaatgggagagagatgacatgaaacgggtgaatgtaatattagcggggggagcttcccgaagattcggagaaccgaaagcttttgcaaagtggaagggcggcatgttttatgaacaggcgaaaaaagccttcggcggcggagaaacggtaattatcagccgccctgagcatataaaaaagttcttatcaaacagggagcggcatgttttggccgatgagccgcggtttcggggaatgggcccgcttgccggcatctatacggcaatgaaacaaacggaaggcgaaatatatacggtcatatcctgtgacacgccgctcgtgacaagaaaaacgatggcggcgcttgaaatgaagctgaccggaaatctggacgctgtcataccggtttgtaaaaacagagagcatcccctcttggcggtttaccataaacgggtgcaggatgtgctttttgatcagctgacacaaaacaaactgaaaatgacagacacgctgaaacggctgtctgtctgttatgtgcaggctgaagacatcggcgccgggccggaggagttcgctaatatcaacacacaggatgattacaccagacttttggcgcatgtcgagtcttcaaatcaagactgatcgggaagaaacatggtatgatggaaataaaaatgcaaggggacaacacagatggaagagcgctattcgcggcagacaagatttaagccgataggggaaaaagggcagcaggcgctggctgacagcagtgtcctgattgtcggagccggagccctcggaacagccgcggcagagggtttggcaagagccggagcgggccgtatggcgattattgaccgggattatgtggaatggagcaatttacaaagacagcagctgtatacagaagaagacgcgagacagcgcctgccgaaagcaatggcggccaaggcgcgtcttttggcggtaaacagtgatatacatatcgatgcttacgcggcggaaggtacggcggaaacgctcgaaccgctgatcgaacaagcggattgcatcgtggatgcgacagataattttgaaacgagaatggtcattaatgatctggcgctgaaaacgaaaacaccttggatttacggtgcctgtgtcagcagtcagggaatgtgcatgacgattattccgggggttacgccgtgtttatcctgcctgtttgagcaaatgcccgtgggcggagcgacatgtgatacagcaggcatcatacctccggcggttcatatcgtctccgcttatcagcaggctgaggcgctgaaattgctgacaggaaatcatgcggcggtaaatcggcgctttttcacgtttgacgtgtggaataacaccaatatgagcataaatgtggatcagatcaaacgggatcattgcccttcctgcggcgcggagcccgtatatccgtatctgcagcctgaaaacaggccgaaagcaagcgtgctgtgcggaagagacaccgttcaaatcagatcggaagccttaaagaggctggataaagaagagcttgtcaaacgtctgaagcagatcggtaaagtggaagcaaatgaatttctgctgcacatggcgtatgagcgcttcagaatcgttatttttcaggacggacgggctttgattcacggtacaaacgatataaaagaagcaaattcagttctggccagggtgatcggactgtaggaaggggagatattgctatgcttgaaaaaagaacgccgattcaggtagacgaagcagtccgccgggtgagccggtataaaaaacagggggataccgaatgggtggcgcttgaggacagtctccaccgctatttggcggaggatgttaaggcggatcatgatgtgccggcctttaaccgttccccgtatgacgggtttgccatcagggcgagcgattcaaaaacggcttcccgtgacaatgccgtcacctttgaagtcattgaccatatcggagccggcgccgtgtcggaaaaagaactcgggccttatgaagcggtccgcattatgacgggggcgcagattccaaaaggcgcggatgccgtagtgatgcttgagctgacaaaaacgttttctgaaaacgggacgaattacatgtcagtgaaacgccctttccatgcgggcgataatatttcatatcaaggagaagacgcgaaaaaaggcagctcgctattaaaaaaagggacgaaaatcacgccgggcgtaaccgctcttttagcaaccttcggctatgcttccgttcccgtggtcagaaagccggttgtcggcattatcgcaacggggaccgagcttcttcatgtcagcgatccgcttgagccggggaaaatccgcaacagcaacgctgcgatggtgtatgcccaggtcattgaagcgggcgcggtgccgctgaacttagggaaaatttccgatgattttgatgacagctatgatgcggtgaaggaagctatgaaaaaagttgattttctgatcacgaccggcggcgtgtcagtcggcgattttgattttcttccagacatttataataagctcggagcggaagttctttttaacaaagtggcaatgcgcccggggagcgtgacaactgtcgcccgggccgatgacatgctgctgttcggcctttcaggcaatccgtccgcatgttatgtcggattcaccctgtttgtcaaaccgatgattcagacatggcttctgaatgaaaaacctcattccggatgggcggaagccgtgttaacaaacgactttccgaaaccgaatccgtttacgagatttgtgagggcatttgtttatcataaggacggaaagatgatggcgtcaccggtcggtctcgacaaatcaagctcagtcacatctctggccgaagcaaacgcgtttatccttctgccgggaggaacgagggggtatgaagcgggccggacggttcacgcgctcctcattcgtgatgagaatggaagtgaatggccgtggtcaattctttcccgatcgtccagatcgtaggttttcaaaacagcggtaaaacaacgtttattgaacgtgtgctgaaagcggcgccgaaagagtgcgatattggatgtttaaaacatcacggacatggcggagaaccggaacctttttctgacggaaaagactcggagcgtttttcaaaagccggggccgcggttacggcagtagaaggggacggcgtcctgcagcttacggcgcgaaaaaaatgggatctggcgggtttgatcagtctgtatgaatgtctgggaattgacggtcttctcatagagggatttaaacatgcgccgcatccgaaaatcattatgatcaaagacagcgaagattggcaaaagctgaagcatttggagcgcgtgatcgcagttgtcagcagaaatacggagcatatgccggcagacgcaggcatgcccgtattccatgcggacgatccggctgccatgatgtttgtgctttcgcagctgaaaggggaatctgcataaatggaacgttttcaaattacaagggaacctatcattgcggaaaatatcgtaaaaaaagttgaaaagcgtgaagccggcgccatcacaacgtttatcggcacggtcagagagtggactgccgggcggcggacggtacggctcgaatatgaagcgtatgaaccgatggctgttcaaatgctttctcaaatcggcgatgaaatcagcgcgaaatgggaaggagccgaagctgcaatcactcaccgtgtcggcgtccttgatatcggagaagcagcggtcgtaatcgccgtgtcttcaccgcacagaaaggcggcatatgaggcgaatgaatatgcaattgaacggataaaacagattgtgccgatatggaaaaaagaaatctgggaagacggcgaagaatggataggcgatcagctggaaacaacgccctatccgaacggaaaaccggatttgcataaaggggaatcgcgatgattaaagtattattgtttgccgggcttgcggagcaggcgggaacaccggtcattgaacttgacgaaaaagagacggcggcgtctgctgtaaaaacactgttaaaggaacggtacggccttcagacgattgacaatgccatgatcgcaatcaatgaaacatatgtaaaagacaacagcatcgtaacagaaggtgataccattgcctttatccctcctgtaagcggagggtgaaaaaagagccggatgtgcatgattgccatccggctttttgtatattgaagctaaattccggagaatatctaaatgggatttaaagggatttgcgattgagctggttttgactgcatgaataggctgaagacagtgccttcacaaggctttgaacctcccgtcataccggtctgacaatgcttttttttacataattatggaacgtaaagctgagaatttgtgttacaatttagcataaatacgcaaacggcaaaaaaattgaaacttctctcagcctaaagcgtacgtataaacagaataatacataggaggcatcagcaatatggaaccaaacctggaaaaaagcaatacggcagtaacggaaaagccgtcaattttcggcgtcattacaagtcctgttgtgcagtttaaaagattaaaagagaagccggtcatcggcattcctctcctgattgtcatcattctcatcgcggccggcagtattttgcgcggattggggatgaattatgaagaagtgctgaacagctcatctcttgacggattgtcggatgatcagattgaaatgaccaaaaccattgctaaattcggctcgatgttcggaggaatcttcgggggcattatcgctctgtttatcgttccgctcatttactggctgtgcgttaaaatttcaggcggcgtaacaacttacaaaaaaatgctctcactcagcctgtttacggcatttattaccaatatcggcttagttattaacggtcttgtcacttattttaccggtgcgggctcattgtatgccgttacatctttggcgagtgtcataccggccggaggcggcgtcgcggtctttttaagcgcgttcgacattttcagcatctggagctatattctgctcgctttgggacttcgctatacaggcggcatttcgaaaaaagcggcctggacttccgcgattgtcctgtttgttattatgcttttagtttcggcagtcggaggactgttaagttcagtgacagcaggtgtataacatgaaaaaaatttggatcggaatcggcatcgccgtaattgttgcagtattcatcggtatcaatatttataagtctgccgctcccgcgggcggcagcgccgggaaaaaaatcgaaaccggaaccatggaaaacagagaaatctcctctacggttatggttccgggaacacttaaattctctaaagaacagtatgttttttatgaagcggataaaggaactcttgataaagtgaaagtaaaagaaggcgacaaagtaaaaaaagggtcgtcgttagtcacgtatacaaatgagcagctcaatcttgataaagaacaaaatgagttgacagaacaatcaaaacggatgcaaatcgaacaagttgaagaaaaactcagagcattaaacagcaaggaacaagatctggcaaaacaagtgggagaagcggaagccaaaaaacaaattgaatccgaacggactgatctgcagcttcagcaaaaaacggcggaaatcgaattaaagcaatctgatttgcaaaagcagtctcttgaaaatcaggtggcgaatctcaatgttaagagtgagatggacgggacggtaatctcggtaaatcaagaagcggcttctaaaaaatcggatattcaagaaccggttatacatataggagacccggaacacctgatcgttgccggcaatttgtccgaatacgacacgctgaaagtgaaaaagggacaaagcgttacaattacctcagacgccatcccaggtaaaacgtggaaagggagagtggcggctgtcggactcgttcctgatcaaaagtcaagcgctgcttcgggggaaagtacggaacaggccgtgcagtatccgttccaggttaagctgatcggaaaccttccggagggcaagccggggtttaaattaattatgaacattgaaacagacaaacggaaagccgatacgctgccgtcctccgcggtcaaaaaagacggagatgagcactgggtctttacggtaaaagacgggaaggccaaacgcgtgaaagttaaagtcggcgataccgcaaatcagcttacggagataaaagaagggctttcaaaggatgataaagtcattctgaatccggctgacggtttgactgacggaacggatgtgaaagcatagatgattcagctttcaaaggtgaaaaaaagctatcagatcggcaaggagacgtttgatgttctccgttcaatcgacttgacgattgaagaaggagaatatgtgtcaattatgggaccgtcgggatcgggaaaatctacgatcatgaatatcatcggctgtctggacagaccgacgtccggcagttacaggcttgcgggcgaagatgtttcttcatgcaccgaaaaagagcttgcggcggtccggaacaaatcaatcggatttgtctttcagcaatttcagctgctgccgcgattgaatgcaagaaaaaatgtcgaactccccatgatctacgccggtatcggcaaaaaagagcgtgaggaacgggctgagcatgcgctggaaaaagtcggtttggcggatcggatgcgtcacatgccgaatgagctgtccggcggccagaagcagcgtgtcgcgattgcaagagccattgtgaacgaaccgaagctcattttagctgatgaaccgaccggcgcgctggatacgaaaacaagcatttccattatggagcagttcacagagcttaatgcagagggcgtgaccgtggtgcttgtgactcatgagcctgaagtggcggactgtacaaacagagtgattttcgtccgtgacggcatgatcgtttcccgcgatgctgagcagaggagagtgggggaatgagcctgtcagaaaatctccggatggccctcagttccgtaagagctcacaagctgagatcgattctgacaatgctcggaatcattatcggcgtcggttcagtaattgttgttgtggctgtcggccagggcggagagcaaatgctgaagcaatccatcagcgggccgggcaatacgattgaattgttttacatgcccagtgatgaagaattaacagccaatccgaacgccttacagcaagcgagttttacagaagaagatattaatggattaaaaggagtggacggcgtaaagcaggttgtcgcttccgcggtaaaatccatgacggcccgttaccatgaagaagacacggatattacgctgaacggcattaacagcggctacatggacgtaaaaaagctggacgttcaagatggacggacatttacggacaatgattttctttccgggaaaagagcaggaatcatctcgaaaaaaatggctgaaaagctgttcgggaaaacgtctccgctcggaaaaatcgtctgggccggcggacagcccgttgaagtaatcggcgtactgaaagaagagagcggttttttatcgttagggctcagtgaaatgtatgtgccgttcaacatgctgaaaacgtctttcggtactaacgactacagcaacgtttccgttcagacggagtccgctgatcaaatcaaatcaacaggaaaagaagcggcccgtctcttaaatgacaatcacggtacaaaagaggcctatcaagtcatgaatatggaagaaatcgcggcgggcatcggtcaggtcacgaccgttatgacgacgatcatcggttcgatcgccggtatttctctcgttgtcggcgggatcggggtcatgaatattatgctcgtatcagtgacggaacggacaagagaaatcggcatccgcaaatcgctcggtgccacgagaggacagattctgacacaattcttaattgaatctgttgtgcttacattaatcggcggcttaatcggaatcggtctcggctacgggggagcatcactcgtttcccttatcgcaggctggccgtcgctcgtttcctggcaggtggtttgtatcggtgtgctgttcagtatgctgatcggtgtcattttcggcatgctgcccgccaacaaagcatctcgcttagatccgattgaagcgttacggtatgaataatcggcgccccatgcagtctgcatggggtttttttgtgttttaatgattgaatgaatataatagacttttttcatttatgataaaaagaaaatgtcatacaattgtccctctttttgtcgaatttacagtttacaaaccctatgtacatacgttaatatgaacaaatgtgaaagattttgatagttattgaatgaatttgagtgattttagttgctagaagtaaaaaaagcgtttacaattatcttgcagccgaaatgaatacgtttccaaaggaggcggaatatgctcactcctgaaaggtatcagctgattatggatcagattgaaaagcgtgatgtggtgaagattcaagagctgataagtatgacaaatgcttctgaatcaacgatcagaagagatttatcaacacttgaagagcgcggatttttaaagcgcgttcacggcggggcgtctaaactttccaacagcaggcaagaacccgatatgcttgaaaaatcctccaaaaaccttcaggataaactgaagatcgcagaagaagcggcatctttattagaagaaggtgactgtatttatcttgatgcgggaacaactacattgcacatgattgattttatagatccatctaaggacattgtggttgtcacaaacggagttatgcatatcgacgctttaataaggaaagggatccccttttatcttctcggaggatatgtgaagcatagaacaggtgcgatgatcggcggcgcctcattaacggcggtcagccagtaccgttttgacaaaagcttcctcggggtgaacggcgtgcacattgaagccggctttacaacacccgatccggatgaggctcttctgaagacaaaggctgtgagacaggcgaaaaatgcgtatgttttagccgatccttctaaattcggcgagatttctttcgcagcgttcgcggccttgggcgatgccgctatcattaccactgaagctgaagaacttgcattcgataattaccaagaaaaaactgtcgtaaaggtagtgaaaccatgatttacactgtaaccctcaatccgtctgttgactatatcgttcacgttgaagattttgccgtaggcggtttaaaccgttccagctatgacacgaagtatcccggcggaaaaggcatcaacgtttcgagattactgaaaagacaccatgtgccgtcaaaagcattgggatttgtcggcggatttaccggaaactatatcacgtcatttttgcagcaggaaggtctggaaacggctttttctgaggtggatgaagacacgcgtataaatgtaaaactgaaaacgggcgatgaaacggaaattaacggacagggcccgacgatttcagacgaagtgttcaatgcctttttagaacagttctccgctctggaagaaggagacatcgtcgttttagcgggaagcattccttcttccctgccgcataacacgtatgaaaaaattgctgaggcatgcagaaagcagaatgcccgggtagtggtggacatctccggtgaagcgctgatgaaagcgacagaaatgaaaccgtttttgatgaaaccgaatcatcatgagcttggggaaatgttcaatacggtcattgattcagccgaagctgccgttccttacggtaaaaaattgattgaacaaggcgctgaacatgcgattgtttcgatggctggcgacggtgcgcttttatttacgaaagaggcggttttcctcgccaatgttcctaaaggaaagcttgtcaattcggtaggcgcgggtgattccgtcgtcgcgggattccttgcgggaatttcaaaacagctgcctttggaagatgcgttccgtttaggagttgcttccggaagcgcgacggcattttctgaagaactcggaactgaagagtttgtacagcagcttcttcctgaagttaaagtcacacgtctatagaggaggaaagaaaagtgaagataactgagctgttaacaagagatacaattcatctcaatatagaaagcaaagagaaagaaaacgttatcgatgaaatggtgacagtgcttgacaaagccggcagattaaatgacagagaggcttacaaagcagccattttaaatcgtgaaagccaaagctcgacgggaatcggcgaaggcattgccattcctcatgcgaagacggcgagcgtcattaacccggccatcgcattcggccgttcaaaagatggtgtggattatgaatcattagacggtcagccggcacacctggtctttatgattgcggcaaccgaaggagcgaataatacgcaccttgaggcattatcaagactttcaacgcttctcatgcgtgaggaaatccgcaaacagcttcttgaagctgaatcagaagatgcgatcattgacatcatcaatcagcatgacaaagatgacgatgaggaagaagaagagcaggaagaacaggcagcgccgtcaggaaaaggcaaaatccttgccgttacggcatgtccgacaggtatcgcccatacgtttatggcagctgacgcactgaaggaaaaagcgaaagagctcggcgttgacattaaagtcgagacaaacggctcaagcggtatcaaacataagctgacggctcaagaaattgaagacgcgcctgcgatcatcgtggcggctgataaacaggttgaaatggaacgctttaaaggcaaacatgttcttcaagtgcctgtgacggccggtatcagacgtcctcaggaactgattgaaaaagccgttaaccaagatgcgccgatttacgagggcagcggcggaggatcttccgcttcaaatgaagacggtccgaaacagaaatcaggcacaagtatcggaagtactttctataaacacttaatgagcggtgtcagcaacatgctgccatttgtcgtcggcggcggaattctcgttgcgatttcattcttctggggaattcattcagctgatccgaaagacccgacatacaacacgtttgccgcagcgctgaactttatcggcggcgataatgcgttaaagctgattgttgcagttcttgccggattcatcgcaatgagtattgcggaccgtccgggatttgcgccgggtatggtcggcggatttatggctacgcaggcgaatgccggattcttgggcggactgattgccggattcttagcaggttatgtcgtagtccttttgaaaaagctgtttgtctttattcctcagactcttgacggattaaaacctgtattgatttatccgctgctcggtatttttatcaccggtgtcctgatgcagtttgtcataaacacacctgtcgcagcgtttatgaatttcttaacaaattggcttgaaagccttggaactggaaaccttgtcttaatgggtattattttaggcggtatgatggctatcgacatgggcggcccgctcaataaagcggcgttcactttcggtatcgcgatgatcggggccggaaactatgcgccgcatgcggccatcatggcgggcggaatggctccgccgcttggaatcgcactggcgacaacattctttaaacacaaattctctaaacgtgaccgtgaagccggtattacgtgctacttcatgggagcagctttcgttacagaaggcgccatcccgtttgcagcggctgatccgcttcgcgtcatccctgcagccgttgtcggttctgcggtagcgggcgggttgacagagtttttccgggtaacgcttcctgcaccgcacggaggaatattcgttgcattcattacgaaccatccgctgctttacttaatgagcatcgtgatcggagcgattgtaacggctgttatcttgggaatcgtcaaaaaaccggttgcagagaaataagcaaaaagcgtcctttacgggcgcttttttcaatcatgtacgcatagtagcgttatgtattttatgatgagttatgataaagtaaagatggtacatgaactgaaacagtgatcgtctaggaggaaccacgttgactgaagaacaaaaacctacttctgaaaaatcggtaaaaagaaaatccaacacgtattgggaatggggaaaggccatcattatagcagtcgcacttgcgctgttaatccgccattttctgtttgaaccgtacttagtggaaggatcatcaatgtacccgacattacatgacggtgaaaggctgtttgtcaacaaaagcgtcaattatatcggagaaatcgagcggggggacatcgtcattattaacggcgatacatcgaaagtccattatgtaaagcgtctcatcggaaaaccgggagaaacggtggaaatgaaaaatgacacgctttatataaacggcaaaaaaatcgcagaaccgtacctcgcgagcaataaaaaagaagcgaaaaaactgggagtcaacctgacgggagatttcggccccgtaaaggttccgaaaggcaaatacttcgtcatgggcgacaatcggctgaactcaatggacagccggaacggcctcggcttaattgccgaaaaccggatcgtcggcacctcgaagtttgtgttcttcccgtttcatgatatgcgtcagacaaaataaaaacgccgcgctgcccgatttggacagcaggcgttttttatttggcaaacgaggcggcgacggcgatgaacattaccgtggccagcactgatccgacaatggccagaacgctgaaaaaaagattcacctgctgcttctctttgccgcgtttttcaagcatccgttttgaaaagagatgcgaaaacgtataaatgagggcgattccgacgtacaagccgatgtcacgtgcggtaaagcccgtgacggccagaaaaaccccggtaaagaaaatcataagacaatattctgtgagtgttaaaagcttcaacttgttcctccgtgatgaatatgtatatatatctattgtatcacagggctccgggtttgcctgcatcttttcaaacccgtatattcgcagggaaacatttctcttcccctttattcatggtatacttttaatgatgatagacacgatggaggattctaaatgattgctgtaaataatgtgagcttgcgttttgcggatcgcaagttatttgaagatgtcaatattaaatttacgccgggcaactgctacggattaataggcgcaaacggtgccggaaaatcaacatttttgaaaattttatccggtgagctggagccgcagaccggcgatgtccatatgagcccgggcgaacgtcttgccattctgaagcagaaccactttgaatatgaagacttcgaagtgctgaaagtcgttattatgggacataaacgtttatacgaagtcatgcaggaaaaagacgcgatttatatgaagcctgatttttcagatgaagacggcatccgcgccgctgagcttgaaggagagtttgcggaattaaacggatgggaagctgaaagtgaagccgctattttgttaaagggcctgggcatctctgaagacctgcatacgaagaaaatggctgacttaggcggttcagaaaaggtgaaagtgctcttggcacaggcgctgttcggcaagccggacgttctgctgcttgatgaaccgaccaaccacttggatctgaaagcgattcagtggctggaagagtttttaatcaactttgagaacacagtcatcgtcgtatcccatgaccgtcactttttaaataaagtgtgcacgcacatcgccgatcttgattttaataaaattcaagtatacgtcggcaactatgatttctggtatgaatcaagccagcttgctttaaagctttctcaggaggccaacaagaaaaaagaagagcagattaaacagcttcaggagttcgtggccagattcagcgccaacgcctctaaatcaaagcaggcgacatcaagaaagaaactccttgataaaatcacgcttgatgatatcaaaccgtcatcacgccgttatccttatgtcaatttcacgccggaacgtgagatcggaaatgacgtgctgcgggttgaaggcttaacaaaaacgattgacggggttaaggtgcttgataacgtcagctttattatgaacagagaagataaaattgcttttacgggacgcaacgaacttgccgttacgacattgtttaaaatcatttccggggaaatggaagcagacagcggcacatttaaatggggcgtgaccacttctcaggcgtacttccctaaagacaacagcgaatattttgacggcagcgacgcgaaccttgttgactggctccgccaatactcgccgcatgaccaaagtgaaagctttctgcgcggtttcttaggacgcatgctgttctcaggagaagaagtcaacaaaaaatcaaacgtcctttccggaggagaaaaagtgcgctgcatgctttcaaaagcgatgctttccggcgcgaatattttaattctggatgaaccgacaaaccacttagatttggaatccattacggcgcttaacaacggcttaatcagctttaaaggcgctatgctgttttcatctcatgaccatcagtttgtacagacaattgccaaccgcatcattgaattaacgcctaaaggcattgttgacaaacaaatgtcttatgacgaatttcttgaaaacgcggatgtacagaaaaagcttgaagagctatacgcgtaataaagaagcaggggagactctgcttttttatttatgaaaaaagttttcaatcttctgacttcccgttacaataaatgaatacataacttgaaaagagacggaggaatgcatcatgaagtttttagttgtcggagctgggggagtgggcggatatatcggcgcgcgtcttgcagaaaagggaaatgacgtgacgtttctcgtccgcaagaaacgggcggaacaattacaagagacgggattgaccgtcaaaagtgaaaaaggtgatgtttcaatcaagccgaaattaatcatggcgggcgaagaaggagcatttgacgcggttatcatcgcttcaaaagcgtattctttgcaggacgtcattcgggatgtcaaaccgtttgtcaaaccttcgtcggtcattattccttttttaaacggatacaggcactatcaccagctgtttgaagctttttcaaaacggcaggtgctgggcggcctctgctttattgagagcgcccttaacgacaaaggggaaattcttcatacgagcgctgcccatcgctttgttttcggtgaatggagcggggaacgcacggaacgtatgaatgagctggaaaacgcatttgcagatgtgaaagcggatgtcatcatcagccgggatattgaaaaggacatttggaaaaaatatatgtttattgccgcgcaggcgggagtgaccactctgtttcaacagccggtcggaccgattttagaaacagaaggcggccgcaacacggcaaagcgcctctttgctgaaatcggtgccattttcaaggttgccggcatcccgaaagatcctggtctggaagaggagagttatcgcacattgacaagcatgtcttaccatatgaaatcgtcgatgctgagagatatggaaaagggcagggtgacggaaggtgatcatttacacggatttttgcttgagaaagcgaaaggcttgtcagttgatacacctgttttggaaaccgtctgcgccaacttgcaaatgtatgaagcgaaataaaaaaaggaggcctgatcgcctccttttttttattaaaatgcccagtttccgtttctgaagatcggttctcttttgccgtccgccgtaatgccgtcgatattcatatctttggaaccgaccataaaatctacgtgtgtaatgctttcatttaagccctctttgacaagctcttcccgtgtcatttgtttgccgccctcaatattaaaggcatacgcactgccgatcgccaagtggttagaggcgttttcatcgtacagtgtgttgtaaaataaaatatttgattgtgaaatcggtgaatcgtacggcactaaggccacttctccgagatagtgtgagccttcatcggtttcgacgatgccttttaaaatctcctcgcctttttcagctttcacatcaacgatgcggccgttttcaaaggtaagagtgaagttatcaataatgttgccgccgtagctcagcggtttcgtgctggaaaccgtgccgttcaccccgtcacgctgcggaagggtaaaaacctcttctgtcggcatgttggccatgaattcgtgcccgctttcattcacgcttcctgcgcctgcccatacatgttttttcggcagttcaatggttaagtctgttccttcagcctgataatgcagggcgctgtaatgttttttgtttaagtgttccactttttcatgaaggttttgatcatgttttttccatgcttcaacagggtcttcttcatttacgcgggtcgttttgaaaatttcttcccataaaagctgaacggctgtttcttccggctgatccgggaacacttttttcgcccagcctgttgaagcggctccgatcaccgtccagctgaccttatctgattgaatatattgtctgtatgtatgcaatgcttttccggcggctttttggaacgctgcaatccgtttgccgtcagtgccttttaataggtcggggtcggatgagacgacagaaataaacgcagccccttttttcgcgagctcttcttttccttttgcttcccattcaggatactcttcaaacgcttcaaaaggtgccatctcgtattttaatctggacagttcatcgtcctgccaatttactgtgacgtttttagcgcctttttcataagaatgtttggcaagcagtctgacaagttcccggacatcagttgaggcattgattacgacatgctgtcctttttggacattgacgccgacttctaccgccagctgagcatatgtatgtaacttttcagtaaacgaactcatcgttcattcctcctcatcggtttttctcatcatatcaaatatcgcctcataaaggaaagaaaggagcacaaacgaaaaagacacagcttttgctgcgtctttacgggtgattcagttttacggcgccgccggccggagaatggggcatattggccagtgatatgctcataccccccagaataattccgcttaaaatgacggctactgctacgcgtcttcccacatctctaagcatatgcttcctccttaatgtttctccagttctcacaatatgagccggccggagaaaaaagaagcacaatcttattatttaatcgctttttgcagtttgtcgatgacgtctaatgaacgccccgtgccgatagccactgattcaagcggattcgccgccaaatgaacgggaacgacgatttcatctgtcagccattctttcattccgtttaaaagggagcctccgccggttaacacgacaccgcggtcaacgatatcaccgctgagctccggcggacaatcttcaagtgtcgctctgatcgcttcaagaatatgcaggagcgactcacgcatcgcgtgctgaatttcattagattgcagtctgattgtcttcggcagaccggttacaaggtcacgcccgcggatttccatcgtttccggcacatgttcgatcaatgcaaatccgatttccattttcacttgttctgccgtacgttccccgatcagcaggttgtatttttttctgacgaacgaggcgatatcttcatcaagctggtcgccgccgattctgatcgaatggcaggatacgacgcccccgaatgagatgatggcgacttcagtcgtaccgccgccgatatctacgacgacgtttgcgaccggctcgtcaacagggaggtcggccccgattgcagcggctacgggttcttcaatcaagtgaacgtttttcgctccgcagtttttgacagcgtcactgatggcgcgtcgttcaacggctgttgagcctgaaggcgtgcagacgacgacattcggtttgcggaaagtcattccgattttttttccggcttttttcataatgtgttttaataagtcagttgtcatatcataatcagcaatgacaccgtctttcatcggccgaacggcgacgattttcccaggcgtctttccgatcatgcttttggcatccgttccgatggcaagcaccgctttcgttgttgtatctacagcgacaacggaaggctcgtttaaaataattcctttatttttactgtaaacaagtatattagcggttcctaagtcgattccgatctcagttgattgaaacatgttttcacccaatccctatcctgatttaattgattctacatttaaagtttctgagaaaaaccacgatttttgggggtttccgccgggaatgaaatgtttttgtaaaaaaggagggaaagtctgtatcccatatttcaaaaggattttcttctgtaaaaaaacattcagttccggatgctgagaaacttttgctccgttcctttcgtctacgtttatgaaggattttccttggacataaagaagagacattaaaggaagtaggggatttctatgaaatcaattggtgtagtaagaaaagtagacgaactcgggcgtattgtcatgccgattgaattgagaagagcattggatatcgctattaaagatagtattgaatttttcgttgacggagacaaaattgtcttgaaaaaatacaagccgcacggcatttgcttaatgacgggggaaattactcccgaaaatcaggagtacggcaacggcaaaattattttaagtcctgaaggagcgaaaatgctgcttgaggaaatcgaggaagcgttaaaagatagatcataatcagcaaaaagggcggagcatcattccgtccttttattatgaacttgtgcaaaaactcacgggaaaagtaagcgaacctgctcaattaattgggaatagttatcattttttagtcaataatgcagtcaacaatgttacaatatatgtagaaatgctagcggcaggtgggactatgggaaaatatcaagcgcgtatcatttccttaatcttggcaatgatttttattatgttttgggattatttattttatatgattgaacggaatccgattaactggcccgttgacatcacctttaccgccgtcacattaatcagcgtctggctgctggcttattatgtggataataaaaagcagctgctggcggagctgaaggacagcgagcagaaagcaaaggcgctttcagatgagaaaaaccggatcatggacaatctgcaggaaatcgtttttcagacggatgctcaagggaatattacatatttgaatcaggcctggacgacgattacgggccactccatcagcgaatgtatgggcacgatgtataatgattattttataaaagaaaaacatatcattgattatattatctcccaaatcaagcagcagtccccgtcaggaatgtttacggccaaatatattaaaagagacggctcgatcttttggggagaagtccattataagctgtattatgaccgcagacagaaatttgtcggaagcctggggacgatgtctgatatcagtgaacggaaaaaagctgtcgatgagcttctggaaacgaacgaacgcctcgccatgcaatctcaaaagctggccattgccggggagcttgcggcaggaatcgcccatgaagtaagaaatcctttaacgtcagtcagcggctttctccagctgatgaaagcccagtatccggaaagaacggattattttgatattattttttcggagattaaaaggattgatctcgtgctgggggagctgcttctgctcgccaagccgcagaccgtgacgtttaccgctcatcatctcaaccatattttacggcaggtggcgacgcttcttgacacgaacgcggtgctgtcgaacactgtgattgagaaggatttcaggcagactgagtcctgtatggtcaacggtgacgaaaaccagctgaaacaggtatttatcaatattattaaaaatgcgattgaagcgatgcctgacggcgggaatattcatatttatacaaaacgggatgaagaatacgcggtgatcagcatacaggatgaaggaaacggcatgtcgaaagaaaagcttgaaaacatcgggaaaccgtttttctcaacaaaagatcagggaacgggtctcgggcttccgatttgtttacgaattctgaaggagcataatggtaaacttaacattaagagcaaaaatggagaaggcagtacgtttcaggtgattctgccgttagaagcggctgctgtccaaaaggaggaaaaataacttgcttctttttgcatacggtttgttacggaagcgtgaagaaaaccatgaactgctgaaaggcgctccgtgtgtgtgcgagcaggctgcgataaacggcgtgctgtacgaaacggataaaggtcagcctgcggcgtctttagcagaaacagcttttgtgtacggggaattgtatgaaacagatcatcagatgatccgtaagctggatgcgtattatgctgattttgatcgaaaagaggttgccgtgacgacggatgccgggaataaaaccgccttcgcatatgtcgtaaagcccgaccagtgtgcctcattcagccgtatcaaaagcggagactggaaagaataccgttttatgaaacgggaggatgacagtccggtttattatttcgcatacggctcctgtatggacaatgcccggtttaaacaggcgggggtcgaccacttttttgccgagccggtcggaggggcggttgttgaagggtattcgacgagattcacgttaaggcgtcctgacggttccagagccgatcttgttgaagacgggggacgaactgaaggcgtgctgtacaagctcccgtttgaagcggcaacctatctgtacaaaagagaaggtgttgataaccacacataccgtcccgcgttcatagaagtgtgtgccggcggccgtgtatacagaggcgtcctgacgtttctcgttcttgataaagctgaggaaattgcgcctccgggtcactatcaggaagaaatcgaacgcggatcggatctgtatttatcgcccgccttttcagaaaagcttaaacgctatatgaactcattgccgaaaatgtgatactattcctattagagatattgtttaaaggagtactgttatgagaaaagagtttgccgttatcggtctcggacgcttcggcggaagtatttgcaaagcattaagtgaagaaggccttgaggtcatggcgatggatattgatgaagataaagtaaatgaatacgccaaaatcgcatcacacgcggtcatcggcgattcaaccgatgaatcggtgctgaaaaacttagggctgcgcaactttgaccacgtcattgtggcaatcggcgaaaatatacaggcgagcattttaacgacgctgatcttaaaggaactcggcgtgaacacgatcacggttaaagcgcagaacgattatcatgagaaagtgcttgcgaaaatcggggccgatcacatcgtccaccctgaacgtgacatggcaaaacgcatcgcccacaacatcgtatcaaataatgtgcttgattatttggagctgtccgacgaacacagcattgtggagatcgtggccaacagcaggcttgcgggcaacacactgcttgatctggacatccgggcgaagtacggcattaatatcgtggccatcaagagagaaaaagaagtgatcgtatctccgctggcgactgaaatgatccaaaaagaagatattctcatcgttatcggctctcttacggacatttcccgatttgaaaaaagagtgcttcacacaaagtgaaaagccgtccgtaaaaggacggtcttttattatgtcagaatagaaagacatttatcatgtaagcggtatattctgcaatttttattgactatgatcaggcgatccgatagcatattgtaccatataaagaaaaagaggaggcctcattttgaacaaagaaacactggctgaacggctgaatgcatcagccggcagacaaaaagccgataccgtcattaaaaacggaaaaatcatggatgtatttaaccaggaatggatttctgcagatatcgccattacgggcggagtgatcgtcgggctgggcgaatatgaaggggaagaagtcattgatgcagaaggtcaaatgatcgttccgggctttattgacggacatgttcatatcgagtcctctatggttactccgattgaatttgctaaagccgtcctccctcacggagtgactactgtcattactgatcctcacgaaattgcgaacgtttccggagcaaaaggcatttcttttatgatagagcaggcgaaaaaggcgccgctgaacatccgtttcatgcttccttcctgtgttcccgccgctagctttgaacgctcaggagccgtattaaaagccgaggatttaaagcctttttatcaggagaaagaggtgctcgggcttgcggaagtaatggattatgtgtctgttgcggaaggtgaagaggatatgctccagaaactgcttgatgccaagcgtcacggaaaacggatcgacgggcatttagccggactgtcttcagatatcatcaatatatacagaaccgcaatggtgtcaaatgatcatgaagtgacgacaaaagaagaagcgctggacagaatcagacggggaatgtatgtcatgctgcgcgaaggatcggtggcaaaaaatacgctcaatgtgctgccggcagtgaatgaaaaaaacgcgcgccgctttttcttttgtacggatgataagcatgtagatgatctgctttcagaaggaagtgtgaaccaccaagtcaaaatggcgataaaggcgggacttgatccattccttgcgtatcagctcgccagcttaaatgcggctgagtgctacggccttgaaacaaaaggggcggtagcgccgggttttgacgcagatctgctgttcatttcagatgtacgggaggctgccgtcacgaagaccatggtcgccggccggaccgttgccgagaacggacgaacggtttatgaacagtctgccggttcctattcgccggaccaggcgctgttggatacagtgcggctgagatcgccgctgactgaatctgatttttatatgccgattcatgagggcaggaaaatgaaagtaatcgaaatgataccgaatcatttggagacgagaaaaaaagaagtgcctgcaccgtctgctgacgcgttttgtcctgatacagaaaatgatttattaaaaatcgccgtcacagagcggcacagcggcgaaaaaatgataggactcgggattgtacaagggttcgggttaaaagaaggcgccatcgccacaaccatttctcacgattcccataatatcatcgccgtcggtacaaacgatgccgatttggcaaaagcaatcaacaggctccgtgacaccggaggaggattaacagccgtgaaaaacggagaattgcttcactccgttccgcttccgatcgccgggcttttgtctgataagtcggcggaatgggtcaatgacagcttgggcgtgcttcatgaaaagcttcctctgctcggattcaccggtgatttcaatccgtttctcacattatcgtttttagcgcttccggtgattccggatattaaaatgacagcagccggtctgtttgatgtcaaagcctttcagcatattccgctgcaataaaaaaactgcactcattacgagtgcagttttttttagacctccataatgatcggaaggatcatcgggcggcgttttgttttttcgtataggaacggagcaagtgtatcggtaatttcgtttttaatttcggaccactgcgttgttttccgatccattactttctccagatggttcgaaatcagctgctgcgcgtcattgatcaaatcaccggattccctcatgtatacaaaacctcttgagattaaatcaggccccgccgaaaccttaaagtcgtccatattgatgctgacaacaacgataacaaggccttcttctgaaagaatgcggcggtcgcggagcacgatattgccgatatcaccgattccgcttccgtcaatgtaaacggagccggacggaattttgcctgccacagcggcttcttcgcctttgagggccagcacttcgccattatccatgataaagcagttttcttcaggtatgccgcaatcagtcgcgagtttgacgtgcattttctgcattctgtactcaccgtgaatcggcataaagaacttcggtttgatcaggcggagcattaatttctgctcttcctgtccgccgtgtccggatgtatgaatgtcattcaatgaaccgtgaatgacttctgcgcccgcacggtacagctggttgatggtgcggcttacgctgattgtgtttccgggaatcggagaggaagaaaagacgaccgtatctccgggattaatggaaatctgccggtgcgtcccgttagcgatgcgtgataacgccgccatcggttcaccttggcttcccgtacataaaatcgttaccttattggcaggcatacgattgatttcgttatgctcaataaacgtatttttaggacaggtaatgtaaccgagattttgtccgatttcaatagccgattccatactgcgtccgaatacggcaacttttctgccgtttaaaacggctgcttcaatcacctgctgaagacggtgtatattcgaagcgaatgtcgcaaatataattctgccgtccacttttcggaaaatatcgtgaatgctttcgcctacgcggcgttctgacatggtgaaatcaggaacctcactgtttgtactgtcagaaagcaggcacaaaacgccttctttcccgatttcagccatctttgtcaagtttgccggttcgcctaccggtgtgaaatcgaacttaaagtccccggtatgtacgatattgcccggcggtgttttgacgacgattccgtatgaatccggaatgctgtgtgtcgttctgaagaaggatactgacgtcttgcggaacttcacgatgtcgtcttcaccgatgatgtttaatttggtctgtcttaacagcccgtgctcttcaagtttattccgaagtaagccgatcgcgagtttaccgccgtaaacgggaatatttacttgtctgagcaggtacggaataccgccgatatggtcttcgtgaccgtgggtgataaacagacctttaattttatcttcattttttactaaatacgtgtaatcggggattacgtaatcaatgccgagaagttcatcttccgggaacttgattcccgcatcaatcagtacaatttcatcctgaaactgcaccccgtacgtatttttcccgatctcgcccaatccgccgagggcgaaaacggcagtctggtcattttttacaaatttcattccgctcataactccaatactttaaaattttcgctctgcttctcatattctaaaaaagcaccgtccacaggctgaacaaattcaatgttgtatttctgatctttcagtttcgttctgacgtcccgttctgaaacgccctcaatgtaaagtgaatctgttttttcccgaacaggtacttcgtcagccttctcttgataaaataccttataaatcatccaaatctctccttaaatgccgtatgttagactcgcttattctattatattcgaaaacggattataaggaaagtctcgagcaaaaaagggactttcaaaaaccgaaagatcccttctacgcgatgacttttttccggagcattccgccccactgtcttctgagtttcttccgtaatcggcgcagcatcgtatacctcctttaaagccctttatagcagtagtatgcgaaaaaaatgaatttgttttcgtgggtaaaactggaatttcatcaaggcggttttccggaagaaaaactttctgtatgatgatattgaaaaagacacgactgataaacgggaaaaaggagaaattgacatgaaaccaaaattgatcttttttgatattgacggcacgatctatgaccatgataaacatattcccgatagcgcaagaaacgccgtgaaggcgcttaaagaggctggccatcacgtttttatcgccagcggaaggtccccgtttatggtaaaaccgattctggaagagcttgagattgaatcatttatttcatacaacggccagtatgtcgtatttgaaggtgaggtcatttataaaaatccgcttcctgaagatgcggttgcgcgtttattaaagcaggcggcagaaggggagcaccccgtcgtatttatggcggaagacacgatgaaaacgaccgtccccggacatccgcacgtcttggaaggaatcggcagtctgaaagcgccttatcccgaagttgatgaaactttttataaaggaaaagaaatttatcagctgcttttattctgccgcggacatgaagaaaaagcatatgccgcttttcaggagtttgattatgtccgctggcatgaattgtcaacggatgtgcttccgaaaggcggttcaaaagcggaaggcattaaaagagtgcttgagcggcttccgtacggcgtaagtgacacttatgcattcggcgacggactaaatgatcttgagatgatccgttttgtcggcaccggggtggcgatgggaaatgcggttccggaattaaaagctgccgccgatttcgtcacaaagccggtggatgaagagggaatcagctcggccgtcaaagaactgggccttttgaaataaagaaaaccggcactttgggaagtgccggttatttttaacggtcaatggcaatggcgttttcaggttctttgaacggattttctttatcaatatggtcgtaaaacatcacgccgttcagatgatcgatttcgtgctgaaacacgatggccggaaaacctttgaggcggatgtcaatctgttctccttcaagcgtcaccgcctttacgcggatgcgggcgtagcgcggcacatagccgggaatgggttcgtctaccgacaggcagccttctccgctcgtcaagtagcttttttccactgagtggctgacgatcttagggttaaaaagagcatagctgtataaagtgcctttcgcatcttctgcatggacggcgatcatccgtttttttacgtctgtttggggagcggcaagaccgacgcccggacgaagcttgtatttctcggctaattcaggatcttggctgtttttcacaaactcaatcatatcagcaagatgctgtttttcttcgtcagaagcgggaagctgaacctcttcagcgatctctctgagcgcgggatgtccgtcgcgtacaatattttccatagtaatcaagaaacttcactcctaaagcttaatatgtaaattatagcgaatttctttatcgcggcgcaacgaaacaattggccggccatagcaggccggccgatgttcatggtgtataaggtcagcagccgcagcctaaataagcggcaccgacgatgattaataagataaacaatacgacgattaatgcgaatgtgcggccgtatccgccgccgcagccgtaaccgtaaccgccgccataaccatatccgccgccgcaacaaccgccgccaaatccgccgccaaatccatatccgtacataaaaaaacctcctcttttaattacgctgaccctctgtcagcagggccggcgtctactataaactatgtaaaagccaaaaagatgtatggtcatccgccctgttttctcaattttttacgcaagtattctttgaaagcaccgtaagcgtctttacacggtcatgccaattacagctcagctattgtcaaaaagcgttcgggcttctatagtggaaattgtcaagattgggggattttaagtgaatatcattcaaaaaaaggtattagcaggaatcggagcgctcggcgccgcaagtatgctgcttgccggctgcgggggaaaagatccggttgaatcgcttcatgactcgatggaaaaagccgttcaagcggaaaaaccgtttcaaaaagagcagaaaacattagaaaaattggagaaaaaagagcataagctatacgacagcgcggttaaactgaatatggatgattaccagaaaattgtcacactgtctgatcaggctctgagcaatgcaaatcagcgaaaaaaacatctgaaagcagaaaaagacagtattgatgattcaaaaaaagcgtttgaatccgcaaaaaaaacttctcaagaaataaaggataagaaagtaaaagaaaaagccgggcatgctgtcgctttaatggggaaaaggtatgcatcttatgatcttttgtacaaaaagtacgaaaaagccatatcacttgataaggacctttataagctgattaaagataaaaagctcacattagcgcagctggaagagcaaatcagcaaagtaaactcagtttacgaaaaggtgcataaacaagcagatgagttcaatcaatttactaaagactacaacaaagagaaagaactattattccgcaaatagtatagtgaaggcatatcggcatgggctgatgaactgataacaaccgagttcagccgcctgtaaaaaggcggctgaagaattggtatatacgtgtgtttcccattgacaacaagtaaatcatggtataatatttatttagggaaatattcacataaaaccaatcgttgtttcggcacgttggaatgtttttattatattgatatatataaaacagaatgaaaatgtgattttaattatcagaaaattctatctatttatatttacggcgatatgatatttgtacatgctttttgcttttaaacctttatccggcataaaggtttttttattttgcttagtaatgcttattaagtaagggggctgagagtaaacgacaattttaaaattgaagtgaaaaacgttaatcaaaatcggaacgaaaagaaacggcagaaatacggaacaggaggaaaacaaatgcttgcttacgtctttcccggacagggagcgcagtttaaaggaatgggcagagacttattcgatgaattcagtgagctcattaaaaaggcagatcatattttaggatactccataaaggatttatgcctttcagatgaaaaagagaggctgactgatacgaagtatacacagcctgcaatttatacagtgagcgcactgcaatatttaaagggtttaaaagaaggtcatacccgccctgatgctgttgcaggacatagtcttggtgaatatactgcgctttttgcggccggcgtttttaattttgaaacaggtctccggctggttgctaaaagaggcgagttaatgagtgaggcttccgagggcggaatggctgccgtgatcggactggatgagcatcacataaaaaaaatacttcaaaagtatgaactcggccaaatagatatcgccaattacaatacatcttcacaaattgtgatagcaggggctgcagaagagataaagcgggcagcctctttttttgaaaaagaaggggcgaaagcttatatcgtattgcaagtcggcggagcttttcattctcgtttcatggaaagtgcacagcgtgaatttgcggaatttatcgaggagtttcatttttctgaattgaatttcccggtcatttccaactatacggcaagaccttataaacaagaagatatcaaacggaatttaattgaacaaataacaaactcggtaaaatggactgaaagcatcaggtatctaatgggacaaggcgtcactctgtttgaagagatcggtcctggaaacattctgactaaattaattcaaaccatacaaagagatgaggaaccgcttactatcagtgcgccggaagacagtctctttttttctgaagggaacaaggacaattcggaaagcgggaaagagcatagcctcttggctgaaaatatagagagcggtgcagcttcaccggtgtcccgattgggtgatcaatctttcaaagaagattacggtttgacatacgcgtatttggcaggtgcgatgcatagagggatctcttccgctgaaatgctgatccgcctcgggaagaaaggaatgctggggttctttggcacagcgggtttacctataagggaaattgaacaggcccttatttctattaagaagacactcaaaaatggccagccctacggaatgaatctgcgatttgagccggatcatcaagatagagaaaaggaattgatagatttatatatcaagcatgacgtacgagtaatagaagcgtcttcgtatttttccgtcagcgtaccattaatttattacaaagcgcatcagttgaagatagacaaaagcggcagggtcatacctcataatcggatcattgccaaagtttcacggccggaagttgcggccgcatttctgagtccgcctcctcaaagtatcgtaaagagaatgtgtcagcacggtatgctgacggaagagcaggcggagtggctcagccgtattccggcagcagacgatatcattattgaagcagattgcggaagtaatactgaacagggctcattgacagcgatgctgccgttttttgttaacctgcgggatgaaatgatggaaacacacaaatacgcaaggaagataaggatcggggctgcgggaggaatcgggactcccgagtctgccgcgtctgcttttttaatgggcgctgattttattatgacgggatccattaatcaatgtacagttgaagccgaaacaagcggttttgttaaagaaatgctgagtgagacaggaatatgcgatactgcttatgcgccttcggagactctgtttgagttcggaacaaaggtgcaggtgctgaaaaagggcacgctgtttccggtcagggcaaataaattatttcaaatctaccaacaatatgagtctttgagtgagatagatgaaaagacaaagattcagctcgaaaatgattattttaacaagacttttgatgaaatctacgaaagcttaatagaaaaacagccgaacctggcccaaaaagctgagcgcaatcaaaaatataagatgctgttactatttaagtggtatttgcaaagaggatgtctgcttgctttggaagggcaggaagaacaaaaggtgaatttccaagttcattgcggcccgtctttaggcgcttttaatcattgggtaaagggcacggatttggaatcatggagaaacagacatgtcgatgacattggtgaaaaattgatgaatgagaccgaaagtctgctaaggcgcagattggatacgttatttctacactaaagaaggagcgggtggaggccaatggttcatttgaataaacagagtgcggatatcgcgataatcggggttgcttgcagattccccgatgcagatcattatcatgaattctgggaaaacataaatagcggcaaagattccatccgggaagtgccgattgaacggtgggatcccgatctttattattcagctgatatcagtataccgaacaaaacaatcagcaagtggggaggttttattcataaagctgaccatttcgaccataagttttttaatatctctccccgggaagcgaaaaacatggatcctgagcaaagaatccttttagaagaaacttggcggtgcatcgaagattccggggtttctttgcaggatctccagcgtaaaaccacttctgtttttgcgggtattatgaattctgactaccggcagacaggtcatgctgaatcggaaatcgacagttatgcctgtttaggaagtttcgaagctatgctttccaaccggctttcatacacattcggtttgaccggaaaaagcatgtctgtaaatgccgcttgtgcatcgtcgcttgttgctttacatgaagcggttaagtcattgcggacaaaagaaagcgattatgcaatcgcatcgggagtaaacttgaatttccaacccggaaaatatatttctttttctaaagccagaatgctgagtcctgacggcaaatgtaaaacctttgacgcagcagcgaacgggtacgttcccggagaaggggcaggcgttgtattgctgcagcgccttggtgatgcagtaaaagccggtcaccatatatacgggatcataaaagggacagctgttaatcatggcggtaaatcccgttccataaccgctcccagagcagaagcgcagtgccgggtcatctcagaagctttacacaatgctgctgtcgatgctgcgacggtttcttatgtagaagcacatggcacaggtacatctctgggcgatccgatagaaatagaagcattgacaaaagcgtatcggcaatatactgaggatactcaatattgcaggatcggaagtgtgaaaacaaatatcggtcatacagaagcagcggcgggaatggccggattgataaaagttctaatgatgatgaaacaccggagggtgccgaaaagcctgaatgtacatacggtaaacccaattatacagtttgaaaaaacaccgtttaggccggcgcttgattcaagtgattggaaggcggcagacggggctccgctcagggcgggaatcagctccttcggttttggaggtgtcaactctcacgtcatcatcgaagaatttatacatacaaaagacgaatctgacagaaaaggaagggtacccttccttttttccgctaaaagtgaagaaagcatgaaacaaatgatacatcattggagaacctttgctgacgattctgaggaattttgcaaaatatcaaatgaagtgatcagcagcacccttttaacaaggacatcgtttgattacagggctggtttattggcaggcagcaaggaggaatttaaaaatcagcttaaagagggattgagttttcggaggaaacaagattctgaatgggcgcttgccatcggtgacttcaaatgggaaagttataaacaatttgccgttttgaaacgggtgttccctgatttagaaaagaacgtaaggccggtgctgaagggtataccaacattgcacagttcatttaaaagaaaatggacacctgagaaaatccgcttgtattctttagttatcaatacggaaatcataaaaagtatcctggcatccggttttaagccaagcctcattacaggcgccggagacggatattacgtcgctcttgcagcagcggatatcatcaaaattgaaaaggccatttctgtcatcacaggcgctgaaaaaccttcgcacatatcctgtgagccgccgtccattccatttgtcaatccgtacacttcaaaaacgtacccgccggttcgattaaatgaagaatatgtaaggatgctgctgaacggtctgagcttcccggctgattttgcagaccgcctgtacgggaaaacacggctgcttcttgagcaccaatatacgtttaaaggttttttagaagagtgggataaagcgggaaagactcaggaaatcgagattttatcttatattgtgaatcgcacggcggataaaagaaatgcattgccggctgatgaggaagcagcgatcatggctatccttgcctctatgagaagactgtataagagatgggatttaacagattatgatggattctttaataatgattatgttctggaaatattaaatttactggatgaaggaatcttgtctaaagaactttttctgagcatgttattgaaaaagcaagacggaattacacaggctgttgcttgtattaatgagcagccggcaggtttttatgataaaactcgttttccgttgatgacagaatacaatcaaatggatgccgtgtctcaggagatagctgaccatatgccgcttcacacggaagaaaagggaacggagccggatgtggatatttctgatttttcagtttttcaattcggatcgctccctccatcagcaaaactaaacaaagcggctgcttttgaagcggacaaaccagccgatgaggctctatatcattcatttatgcaaatgtggctttcaggagaagagattgaatgggcgaaactaggtgattatcataaaagaaaagccccgcttccgccttatccgtttgagcgctctcaattttctttaaaccctcagccggtaaaatcagacgcggctttttcagaaaagaagaatcaggcactttatacgccggtatggaaagaaaccgcaattgagaatgaagcgggcagccgacaagtctgtactattttgttgttctccgggaataaagactattttgaagagctgaaaaaaagagagaatacgtccgcatatcttattatgcccggtgagcgtttagagcagataagcgacagtgttttcacgatcaacaggcagcgtcccgaagattatcaaggtgtcattcgtctgttaaaggaaaaaggcgcagcgcccgatgcaattttgcatacgtggtctgaaaaacagcctgaactggaagaaacactcgaatcaggaatttattccgtgttttatctgactaaggctttaatcagcgagaaccttataaataaagtaacgttcatttatacattcagcgcgaatcaaaaagaaaaattgccgtattttgaaggtgtgaacggttttttaaaatcggtaaaacaagaatacccgcagcttcattgtaagacggtttgctttgaacatgattctgcatccgtttcattttcagagaaggctgacattctttataaagaaataaacacagcgcctgatcggcatattcatatcacttacaggggctgcgtaagatatgcacggatgttagagaagcagagagaaacaaacagaaagaccgttcaataccctgaaaaagataaagtgtatttaattacagggggatttggggggattggcagtaaagtcgctgaatattgcgcgaaaactgaaagatccaccattatcctatcggggcgatctgttttaaacggagataagcagaaacatttagaatacctgaacagctttaaagccaaggtttattatatacaggcgaatatatccgataaagaagcggtaaaaaaaatgattgacggtattaccgatcagcatgcaggtcttcatggcgtcattcattgtgcaggagttatcagagactcgctgctttttcgaaaaacaaagcaggaactttcagaggtgattgctccgaaagttcatggtgcattgaatcttgatcatgcaacgaagtcgctcgaattggattttttcgccgttttttcttcagtcgtctctattgcagggaacgaaggccaatgtgattatgcatatgcaaacggctttttagatcattttgccgaatatcgggaacagaaacggcaaaattctctgcgcagcggccgcacgctgacaatcaattggcctttatggcaagacatcggaatgggggcgaacctgtcaggtcaagggcggacgtctctttttcatggttccgggctcgaagaacttcctgctgaagacggaacgcaatggttttcgcggattgtaacttcgtgtcagctgcataatattgcagtctgcggtgatcatgagcgctttgaacaatttatgcggcagagatttttgacggacgaaacagagacaggcagtgccattcctttggctcaaggcgatattttggatcagacagttttgtttttaaccaatatcatctcctctgagatcggtgcagaacgggaagagatcgatcaagatgtgcatctggctgaatatggaatggattcggttatgattcatcaatgcaacacaaagctggagcagtcactgggagcaatttcgaaaacgcttttatttgaatttcatacaatcagagatttagcagatcatcttgtaaaggaatatccggatcggctggggcgtttattttcacgggaggaaaaaggaaaacagattcagagcattacccccgccaggccggaacaaaacatcactgcacctgcggcggaggaaaaagaacatcttgacgggatagcggtaatcggtatcagcggccgttatcccggggctgaaaatatcgaagaattgtgggagcttctatcaaaagagagaaccgcaatcacagaaattccgaaagaacgatggaattatgagacctactatgatccagaccccgctaaagcgcatgaggggaaaatttattgcaaatggggcggatttttaaagaatgctgaatcatttgattctttgtttttccaaatatcgccgagagaagcagaagcgatggatcctcaggaacgaatatttctcgaaaccgtgtggaaagcatttgaagattcgggatataccattgaagggttgagaaagcagaccgaaaaacatgtcggtgtatttgcgggagtgacgaccaattcttacaagctgctcggcgaaagaataccgacggacaaaaacgatgtacttccaaattcgttcccatggtctctcgcgaacagagtgtcttacacatttgactttacaggtcccagtgtccctgtagatacagcttgttcttcatccttaacggcaattcacatggcttgccaaagtttaacaaagggtgagtgctcggttgcggttgcgggaggagtaaatttatatcttcatccttctgactatttatacaggtgtcagatggggatgctttcaaaatcgggaaaatgcagaagttttggagaaggcggcgacggtttcgtgcccggggaaggtgtaggggccgttattcttaaaccgcttaaagatgccatacgtgataatgatactgtgtacgccgtcattaaaggaacggcaattaatcatggcggaaagacaaatggctatacggtgcctaatcctgccgcacaggcggatttaattcaaggagctcttaaagcggccggttggagcgccagaagtgtcagctttattgaagcccacggcacgggaacgccgctgggtgacccgattgaagtccgaggcctgaccaaggcgtttagagcttataccgaagatgtttcatattgctctctcggatcgattaaatctaacatcggccacctggaagcggccgcgggtattgccggcctgacaaagattatcttacaaatgaagtataaaaaaatagccgcaacactgcatgctgaacgggtgcatccggatctttatctggaagagacacctttttgcctccagcaggaaaccgccgactggataaaacccgcgaatgaaaaacattctgacagcaaatatccgcggcgtgcgggattaagttctttcggagcgggcggggcaaatgctcatatccttgtggaagagtatgagtctgctgctgactgtcatacgaggcgtgaggaaagtgaggaacttatcgtactctcagccaagcattcactgagtttacgggaatcagcaaaacagctggaggaatatcttcaaaaggcccgtcataagcagggcgagtttttacagcaagcgggaacaaacaagccgcttcacctttctgatattgcgtatacccttcttgaagggcgtgaagccatgccggaaaggcttgctgtcatttcaaataatatcgatgatctgatgttgaaattaaatcacttttataatggaattgacgatcacgaaatatttagagggaaaaaaccgaatcataaacgcagacagcagcaatcggatcttccgctcaaatccggcggcaccagattaaccgaaatggctgaattttgggtatcaggaggcaatttaagctgggaagatttccgcaccggcagaaaaccgagaaaaattgccctgccgacttaccctttcttaaaaaacagactgtgggtgtcaaataaggcgcaaacaacatcagcagccggtacagctcctttatttgatttttcagcaggtgagtgccgattttataaaacgctttctgattctgaatattatgtaaaagaccatgttgtgcatgggaaaacggttctgcccggagcggcaatcatcgaagcggccagagaagcgggagagaggctgtacggaaaatcagtcataaaactgagtcaggttgtatgggcggttccgataaccgttgaaaaagaaaagacgataatgatagatctgctgccgaatcaaaaagacggcagatttgtggtgaaaaccgatatgcaacctgaagcggcagttcactgccaaggaaacattaccacatgcggagatcaagatgcctctcatacagagcgttttcaattggacagctggttaaccggacagaaaagattaatcagcggcgctgaatgttacagggatttccggcagagcggtttggactatggaaccagttttcaggtaataaaacagctgtttatccatgaaaatgctgttcttgcacgaatatcacttcctgagagcattcataaaaaatccggcacgctgctggaaccgtgtttattggatggcatttttcaatccacaacagggtttacgtccagtcagcaagacgatcacaccgcatatttgccttttgaattaggtgagctggagattcttcacgcaccttcggcaaacggctttgcttatattacagctgccgatgaaagacaacatgatgatgtcaaaaggtttcatatactatttatggatgaaaacggatctgtaagtcttaaaataaaaaacttagcgttgaaggcattaagggctgcaccgcagactcaggatgagcggcattcagttaagtattacacagatatgtggaagcgggcccctatgcttcatcagcctgaagccagcggtttaaacagctgccttgtgatttcactccgtcgggatatatcagaaccgctgatccgccaggcatataaagatatcggcctgaacatgatctttgtccgccatggcggcagttttcaagaaaaagaagctgattcctttgaattgaacagcgtcaaacttgacggctataagaaattgctggcgattcttaaagaaagacaagtgacaattgaccgcgtcattttaatcgggatgagccctgaaacgggaattgagcagaacattcgtgaaaagctggaagaggctgttttgccggttttcaatgtaacgaaagctctgttagcaacaatcccaagacataaaatcctgatatcacatgtatttttcacaagggaaaatcaaatcttaccttatcaaatggcaatcagcggcttttttaggtcgcttcatttagaacatcctatgttgtccggtaaaaatattgaaatacacagcgacgaaattcagttacagctgaacaccggtctgcctgaattaaaaaaccttgtgaaagaaacaatcatcagcgatgatacttcagaaatcagatacagagatggaatcaggcaggtaaagcactctgcagaaattgaaagtgccgagccccccgaaaagatggaagtaaaagaagggggagtttacctcattacaggaggaacaggcggtctgggactgattttcgccagacatcttgtgcgaaaagggagaataaaacttgtccttatcggcaggtcagagctttctgaggaagccgtaagcaatgtaaaagagctcgaaaaaaacggatcagaggttttttatgtaagaaccgatatttctgataaggaaaatgtcaataacctgataaaactcgtcaaaaacaaattaggtcctgttaaaggaattattcacagcgccggtgtgataaaagattcattactcatcaataagcgtgaagaggatctcgattcagttttggccagcaaggtttacggaacaatatggcttgaccggtatacagacagagaacctctggacttttttgttatgttttcatctatcagcgcaataatcgggaatgccggacaaactgattatgcttatgcaaaccggtttatggattattttgcggaaatgagagcggcggaaaataaacctggaaaaacagtctcgattaattggcctttatggaaagaaggcggtatgcaaattgatattcattcagagaagttcctttatgaccgtttcggaatgctgcctctggtaaaacgggaaggccttgcagcatttgatcaagcaatgacagggtgtgaacatcaaataatggtatttagcggtaatgaattaaagctggaacgaatgataacgattgacagcggaaaaagtgatccggcaatcgccgacgaaaatcacgaaccgaaagagctgtcaataactgaatctttaaaaagcactttgacacgcatcatcaccggcgtattaaaaattgaagaacgggaatttgattttgaactgccgataagtgaatacggatttgattcaattatgtttacaatgctgggcaacgaattaaacgaaactttaggaatatcaatgatgccgtcagattttttcggtcttactgattttaatgaacttcttgagtttttaaagagtgagtattccgaggagcttcatctctgcggttctttttcttcagatgaatctgcggcgaaagaccggagagaaaatctgattgagggcatcgcaaagatgatgtcaagtattttgaagattgacagaaaggaaatagaagaagagacttcattcggcgagtacggatttgattctattacgtttaccagactcggaaatgaaatcaatcaacaatatggtacggaattattgccgtccattttctttgaatgcaattcactggctgaaatgactgattatgtaatcgagcaatacggagaaatcctttttgctgagacagaatctttttctgcagctgacgaaaaaacattgtacagcacgcctccgccggaatcttatgaacattcccctgagcctgaaaacaaaaccaggcaagaggaaagacatatgaatgagccggttgcaatagtgggaataagcggccgtttcccccaaacagatacgctggaagacttttgggaaggaattgaaaaagggcgggatatgattacagacattcctgaagaccgttggaactggaaagagtttgacggcgatccgatcagggacgtcaatagaacaaaaataaaaaaaggcggatttatcaaaggcgcggacagttttgatccgttgtttttcgggatttctcccgccgaagcagaattaatggatccccagcaaagaatttttatggagactgtatggaaaacaatagaagatgcgggctataagccatctgatttggcagggacgaaaaccgcggtgtttgcaggggtcgccacaacggattatgctgaacgtctgaatgaaaatggtgtctctgttcaggcgcagaccgcaaccggtttaaatcattgtatattggcaaatcgtatttcttaccagctgaacctgacgggtccgagcgaaccgattgacactgcctgttcaagttcgttagttgcactccatcgtgcggctgaggggattcaaagaggcgattttgaaatggcgattgcaggcggagtgcatattatgacaagccctactctgtttatagcttttgataaagcaggtatgctttccaaagacggaaagtgcaaaacgttcgataaaagcgctgacggctatgtaaggagtgaaggggcggctgcagtattgcttaagccgctcagcaaagcacaggcagacggtgatcatatatatggtttgattaaagggtcagctgtaaatcacggcggccgcgccaattctttgacagctccgaatccgaacgcacaggcggacttattaaccgaagcttggcggaaggcgggagtcagccctgccactgcgggatatatagaagcgcatggcacagggacaagtcttggcgatccgattgaagtaaacagcatcataaaggcatttaaaacgttatatcaagaatgggacattccttttgcgaaacagaaatgctgcggaatcgggtctgtgaaaacaaacatcggccatctcgaaaccgctgccggaatagccggagtgatgaaagtgttactggcttttaaatatcgcaaacttccgggactcgcccatttttcagaactcaatccatacatcaaactggaaaatacgccattttatatcacagaaaccgctcaaaagtggaatccgataaaagataaagagaacaacgatctgccgaggagagcgggtgtcagctcattcggattcggcggtgtgaacgcgcatattgttttagaggaatatagggaacctcaaaaagaaatgccggaaaacaacggtaacacacatatttttgttttatctgcgaaaaccaaagatcaattacttgagtatatccggcttatgcttcagtacttggatcgcgtgattgccggtgacatgaccgttaatgccagtgacatggaatttacattgcaaaacggccgggaagcaatgaacgaaagaattgccgtatgtgcagcgagtctgactgagctgagagataaatacgtcagctttcttgatgacagcaaggtgcaaaaaggcgtatttataagcgaaaacactgaagagcccacagctgtttctgaatatatgattgaggaggctcttcaaagcggaaaagaggagctgctcgcacaatggtgggccaatggagccgagtttgaatggaagacaatcggcaataagaaattgaatagagtgccgctgccaacttatccgtttgcaaaagagagttattggttcaccccgaaaaagaacaaaagcgaggttaatagcaaaagtcttcacccattaatcagcgagaatgtctcaacattaaagaaacaagcatttaaaactgttatttccggaactgaatttttcgtcactgatcatcttgtttcaggagactatgtgctgccaggagccgcttcgcttgaaatggctcttgtttgtgcggaaataagcggagaaagtaaagtatctaaaataaaagacgtgatgtggaacagacctatattatataaaggaaaaacgctgcacatttataccgacttggaaatgaaacaagataagttgaacgtaacgatatgtaaagaggggccggatggcgtgcagcaaatctgcacacaaagtgaaacagtattcggagacataaacagcaatgctgagtatgtcgatattgataagttcaaacgcagcagtaaggcggtcataaaccgggaagagtgttatcaccgcttcagtcgtatgggcctgacatatcatagcggttttcaaacgttgaaagccgtatatcgcggtgatatggagttaatggcagaattggagcttccggctcatttagcgaacgggttttcacattttacacttcatccttcattaattgacggcggttttcaagcggcggcatttttgttaagagataatgagaaagacggcttatttgttccatattcacttagagagcttcacattaagaggacgcttactgcccgatgccatgtctcggtgagagaaaccggtttttatacgtataacattgattttattaacgagagcggcgaaatagccgtgagcatgaaagacttttctgtcagaaaagtgaccgggggagaattaaccgcaggacgtaaaaatgaagatcaggaaattctcttcttattagaacaattgaaaaacggtgaactttctgctgaccaagtttatcagctgctggagggaaaatagtgcagatcaaacaaatactttccttaattgaagaacagcaaatgtctcctgatgcaggactggagctaattcgcacttacagaaaagaacaaatggaaaaaaaggcggagccggaatcacaagctccgtccccaaccattttttttaagaacgattgggtaagaacaaataacattgatatgccgaatcagcaggcaccggggaatatgctgatttttgatcaggataaccgtctttttcagcatgccgagatgatgaatggagatcataaccgtgtcattctcgtaacgcccgattctgattatagaattgaacggaatagatgcacaatcaatccttctgatgaaaatcatgtcgaaatgctgctgtctgatttggctgaaaacggatttacacctgatgtcgtgctttatttatggaacggagaaatcagagaattcactgaaaaatccgttaatgaaactcttcgcagagggatcaactcgctctttttattatcaaaagctttaatgcggagaaacgaacctgttacgttattgcatatttattggacaagcggtctgaatcagccgtttcatgaagctgtcggagggttcatgaaaacggtaaacatggaaagctctaagcttaaagcgaaaagcatacagatacgccatgaggattctgacaaaaatcctccggtttccgagatgtgggatgctgcaatcagtgaaatacagcgctttcaaacggatgaatgtgagattttaatagactcatatacccgttatgtgaaagggctgcagcatattgatattccggaacacgccaacggatctgtaacgtatcaaaaaggcggcatatatatcattaccggaggagcgggaaaactcgggctgctgtttgcggaacacatcgctaaagaaaaccaagccgtgattatacttacaggccgttcttttttaacagctgatcaaaaagaacggatcagtaagcttaatgagagcggctctattgttgaatatcagcggacggacatcacagatcgaacagaggcagagcgattcattttcggcgttaaacagcggtacggcagcataaacgggatcattcatgctgccggcatccttcgtgactcatttcttgtaaataaaagtctcagtgattttacggacgtactgaaaccgaaagtttacgggacaatctggctggatgagctgacaaaagacgaagatcttgatttttttgttctcttttcttctttttccgcttacggaaatgccggccaaagtgactatgcgtacgcaaatcattttatggacagttttgcagtgcttcgatctcagctctcccgaaacggaaaaaccctatcaatcaattggccgttattgaaagatggcgggatgagtctcgacagcagtggaatcaaccaaataaaagaaaaatacggaatgactccgatgcgaacttcctctgttttggaagcgtttctgaaaatgctgcggtcttcatttaccagcttaatgcctgcagaaggaaagcgggataaaatgataaaagcgctttcgattcaaagaaatacagctgcagcagatcaagatacactcacggcggaacacgatgaagaagaggaacatgctgcgaaagaaaaagtaaatgactatttaatcaagatcatcagcggtgtcttgaaaatccaagctcataaaataaatgcgaaagactcttttgagaaattcggaatcaactcacttatgatcatgtcacttatttcaaagcttgaagatactttcggggatcttccaaaaacaatcttttttgaatatcagaacattgaagagctttcaaacttcttcctaacatcttttaaagaaaaagtgcttaaggccgcaggggcagctccggtaacaagagtgccgaagaaaagagaaaatctgagtaaaaaacagcaccggcagcagaaggatacatctgcaccgagcatggttcagccgggtgaggatattgccattatcggtgtgagcggaagatatccgaattccgatactcttgaggagttctgggaaaacattgccggagggaaaaactgtattattgaaattcccgaggaacgttgggatttcagagcgaattacagtcccgacagaatggagaaggggaaaatcaacagtaagtggggcggttttatcagcggtgttgatcaattcgatccgctgtttttccacatttctcataaagaagctgagctgatggaccctcaggagcgaatttttctcgaaacctcctggcatacgtttgaagattcaggatatacaaaagagaagcttgacggtatgaaagccggtgtgtttgtcggagccatgtacggacaatatcaattattcggcgcagaagaaactgcgcggggcaatccgattgcgctcagttccttcttttcatctattgcgaacagggtttcatacttttttaatctctccggcccgagcattgcactggatacgatgtgttcatcatcgctgacggccattcacttggcatgtgagagcattaaaagaggggaaagtgaaattgcgcttgcgggcggcgttaatgtgtccatacaccccagcaaatacctttggctgagtcaaggtaattttgtttccaccgaaggattgtgcagaagtttcggagagggcggagacggctatgtcccgggagaaggttcaggagccgtcctgttgaaacctctggaaaaagcaattgctgatcaggatcatatatacggagtgattaaaggaacatctgtaaatcatggcggaaaaaccaatggatttacggttccgaatccgaatgcacaagctgagctgattgctgaaaatttcaagaaatcgggcatcagtccgcgatccgtcagctacttggaagcacacggaacgggtacctcgctcggagatccgattgagattgcaggattgacaaaagcgtttgagaaatttacggacgataaacaattttgtgccataggttcagtgaagtctaatatcggacatctggagtctgccgcaggtatagcagcccttacaaaagttcttttacaatttaagcatcagaaattggcgccatccattcactcggaacagctgaaccaaaatatccgatttgaaaagacgcctttttacgttcagcagaaagaagaagagtggcggaaagaatcaggcgcctcccgcaggagagcagcaatcagttcgttcggagcgggcggagcaaatgcccatgtcattgtggaagaatatcaaaaccatgcggacacacaaacaataagcggtccgtttgccgcagttctctctgccaaaaatgaagacaggctgaaagaatacgcccggcgccttctgcaattcacagagcgggagacaaaggcctcggcagctgatatcgcttttacattgcagacatgcagggaaccgatggaagacagacttgctgttgtagcttccgatttgccgggacttaaggagaagctgagaactttctgtactgaaggaacaattggagagggcgtatacaaaggcaatgttacgaaagattttgataaagtctttatctttcatgatcaaaagatgaaagataaattcctcgaggcgatgatggagacaaaggacttgaatcttcttgcaaaattatggtctttcggggctgatattcaatggagagagttatatgaagaatataccccgcaaaaggtcaagcttcctttatatccatttgctgaggagtcttactgggtgcctcgaaaccaaagtgcaacatttccggaaatattgccgcggcagtcttcactgcacccgcttctggattcgaatgaatctactctggaacagcagttttttaaaacgacattaagagaaaaagagatttggttaaaagaccacatcgtaaaaaacaagagcattctcccggcagctgcttttcttgaaatggcatgcgcagcgggaacgcggtcatatcgaaagaaaaaggtcactcgtttaaaaaacgtgatatttgccagaccggccatgcttttgaaagagagcctgaccatttacactcacatttccgtaaaagacggcagcatattatttaacatgtcacctgacgaggatgctgctgtaaggactggatttgtgacgggggaattagattatgatcatcattacagtgatgatgatatagagaacatcgacagacaagagatgataaacagaagtgcttttgtccgtgaacaagatgaatgttacgagtattttcgggaaaacgggttcctgtatgggcgcgcttttcagccgattcaacgtttatggggcggaaaaacggaagcggttgcacagttattgctgccaaaagaagccgcatatgctcttgaaaattatacattgcatccgtctttaattgatggggctctgcaatctttgttcggcattacggacggaagagaagaggcatctgtttatgttcctttttcaataggagagattacggttcggaaaaaggtttcagcagaatgctgggcttatgcgcgtaaaacaggccaaaaaggtcaatccgagcttatttacgatattcagctgcttaatgaacaaggagaaagacttgcaggtttgaaggatgtaaccattcgtaaaaaagaaacgttttccgcggaggcacagactcgtgcaacagcggattccaatggaaagaacgagagagtaaaagagctcctcagacaattaaaagcgggcgaactgactgcggaggaagcagattatgcgctggagcgtatgcaggattagtttatcattttgcggcagtgccatttgtaaaggggatgaagatttttatgaaagaagcccgtcatattagaaaaaaagtactttctgacatagaaagcggcatcatttctttggaagaaggagtaaagcggatacagcagcttggttctcattccgcagggggtaacggacaggcgatatattatcagacggtctggcagcggacagatctcagcattcatgtaaaaggcggccggcgtgagggcagccttttattatttgataaaaatgaagatgtgagtaaagaacttgctgcattgcatgatacaagggttattttggttaagccggggaaagagtttcgaaaaaccggggacggtgtatttgaaatcgacccccgctctgaaagagattacataaacctgttaggatggcttatagaagaagagaagtcagatatacgggaagcggtgcatttgtggtcagacatgccgtttgaaaagacagagagagcgattcgtgaacaatgcgacagcggagtctattctttgtttttattacaacaggcgctcttcaaaaataactgccgcaaaccgatcaaactgttatatggatatttttcacatctttctggagaacagcctctttacgcggcggcaagcggatttttgcggacattgcagctggaaaatccgttaatctcagcaaaaagcattgagatggagcagtcaatagcagctgttcacgcagctgatatcatacgcaatgagctgagtgatttccagccttcagatgtagagatccgttataaagacatgcagcgttatgttaaacagctcaaaatgtatgaacccgaaaaaaattccggaagcggagatgtgccgctgagagaaaatggagtatatattatcgcaggaggcgcgggcggattaggatttacctttgcagaatatttggcttttcaaacaaaatgctgccttgttttaacggggagatctccgctttcagatcatataagaaaacagctgagacgattagaggatgccggttcttcagctgtttatgttcaggctgatattaccaataaggaagaagccgaatatgtagtcaaaaaagccaaaacttcttatggaaaagtaaacggggtcattcagggcgcgggaatcatccgtgactctttccttcttaacaagtcacgagaggaattcgatcaggtaatcagaccgaaagtattgggtacgatgtggctgaatgatgctgttgagaaagaaaatcctgactttttcatttgcttctcctctacttccgcagtgttgggaaatgtcgggcaatctgattacgcgttcggaaacagttatatggatcatttcatgaatatgcgttctgcccaggattctgatacgatttctctctctctgaactggccgctgtggaaagaagtcggcatgcaagtggatgagcgcacggtagagacaatgaaaaaggcgggtttttatcctttagaaaaagaggaaggtaaagaagcgtttgcagtcgcattgtcctccggtttttcgcaatttactgtattttacggagatgagcaaattgacaatcatgttcagcaattatatgaacgaaaagacaatattcaggcagatgaaggaacagggagaaatatcgaatcatttgattcagagaaactgaaagctgaaacatctgatttcatcatcaaagtgattgctgcagaattcaggatgcctgcggacaaaatagatgcagaagaggcattggaaaaatacggacttgattccgttatgattatcaatatgacgaatgagcttgaaaaacatttcggcgcgctctcaaaaacgctgttattcgaatatcagactgcagaagaattgtcacagtatttcgttgaggagcacagggatactcttcttcataaactccggttaggagaaaacgggagcagcaccccatctcagaagaaaaaagatcatgaacagacagccgaagttaacgggaaacagaaaatccagatgaaaaatcaggtgcagcaggagaagtatcatgacaatgatatcgcgattatcggtatcagcggacgttacccgatggcaaatgatcttgatactctgtgggaaaacttattgaacggtaaagactgtataactgagatacctgaggatcggtgggattcggggctgcactatcagcccgcagcgggcgatgaagtaaaaaaccaaagcaaatgggggggatttattgacgatgtgtatcattttgatccgttgttctttaatatttctcctgccgaagctgaattaattgatccgcaggagagactgtttttagagacggtttggcacaccatagaagatgcggggtacgcaaagaaaacgcttgaacgaaaaaacgtcggtgtttttgcaggggttatgtacggccactatcagctgtacagcgttggtcacgaagcggccgtttcttcctcatatgcatcaatcgccaaccgggtatcgtacttctttaatttcagcggaccaagtattgctttggacacgatgtgttcctcatcattaacggctgttcattttgcctgtgaaagtttaatcaggaatgaatgtgaaattgcaattgcaggaggcgtcaatttatccattcatcctcataaatatgaactcctgactcaaggcggatttttatccagtgatggccggtgcagaagcttcggttccggaggagacggctatgtgccgggagaagggacaggtgccgtgctgctgaaacctgtaaaaaaggctattgcggacggtgatcagatttattcagttattaaggcaacagccatcaaccacggtgctaagacgaatggatataccgtgccgaatcccaaagctcaaagtgaggtcattacgagagccttaaaaaaaggatttattgatccaaaaagcatcagctatatagaagctcacggaacaggcaccgccttaggagatccgattgaaatcaccggtctgaccagagcattttcagatgccgaacgcgataagaaaacatgcgcgatcgggtcgattaaatcaaatattggacatcttgaggctgctgcaggcatagcgggcattacgaaagttattcttcaaatgaaacataaaacgattgttccgtcactgactcattctgctgaattgaatgaaaatataccgtttcaaaaaacacctttttatgtaccggacagtgccgaaaaatgggagtcatccgttcccaggcgtgccggaatcagttctttcggggcaggaggagctaatgcccatgttattttagaagaatttgcggatgaagctatctctcctctcgcggctgaagaacctgaacagcttttatttgttttttctgcaaaaaatgccgacaggctggcagaatatgcaaaacgcgcaaaagaacatatagcagccagagattatccattagaaacacttagaaatacagcatttactttacaaaccggcagagaagaaatgccgcacagattggctgttatcgcctccacaagagatgaattgcttaaaggactgacagactatactctcggaaacgcgacggatcatatttttacaagcggcaaagacacaacagaagctcaaaggatgaataaagttgaaattgaagaagcagccgcaaacagagatcttttgaagattgctgaatactgggttggcggtaacggggtagattggccgtcactttataaagatgccactctgagacgggtatcagcacccggatatccatttgccaaagagctgtgcagaatagatgcgcaaaatatgggaagccgccggatgaacgttaataacgatctgcatccttacatttcatgcaatatatctgattttaaagcacagaagtttcttatcaatgtaagcgataccggtttgtatataaaaacaaagtatcaagacaaggaaatgtttccgtttctcagccagattgaaatggcgagagctgccggagcgatggcttcagggaatccgattattaaattaacagagctctcctttagagaaccgatgttacaaagcggaagcaatgagcagatccggattgtattaaccccggataatcagggtgcatcgtattctatagaaaaacagagcgactcatccatttattcctcagggcggctcgaattagaaggcggggcgtacgagaacggaaatattcatcttgagccgtttctgtctcagcgcgcagaccccattccgtacgaagcgttttatcagcggcttgccgaattcggatacagctgcagtgacagtctgaaagcggcagagcactgcgtcagcaggaacggacaggtacttttaaaaataaaagcaaaggccgggccgaaagggtgcataatcaaaccggaagttattgagagcgtatatcaagccgtcatataccttgcgggggaaaatgccggagagctcccggaaaacattaaagaatgtacgatttttgatcatgagactgaacccgtttatgtatatgcagaacaaactggagaaagcgattcggcttatgatgtgtatgtattagacaatgccggcgggattttgatggaactgagcgggctggtttttggcgaaaagcctaataaaaatgtacgtttttatgagcataagtgggatcaaaaaaaccctctgattgaaatcaaagatagggagccaaaaacaattctggtctttgcaaaagatgaagcactggctggagctctgaaaaatcaatcagacagtcgtgtcattctcgtcacgccggatcagcggcagatcgatcaggacctgctgacattctgtgtaaacccggaagtgacgtcagattacattcgtttattcgaagaattagagaaaaaggggttttctcctgatgtcatcttgcacacgggagaaacattttacgcgggtgaccaccttctcagcggcctggaatcaattttttatttattaaaagccctgagcgcccgcagtgacgcctctctttatcttcattctctgcttcttgttcactcatttaaagaaggcgtgaatgatccgtatacgggcgctcttgcaggctgtttaaaaacggcaaatatgttggtgccatccgcagagaatgtgaagtcaatcggtttttcagaacgtatatcaattgaaaaaatggctgaattttgtcttaacgaaatggtttcaggcgtggaacggcaggctgaagaagttaaatatattaatgacaagaggtatgttaagacattaaaggactatgtattcaatcatacagagcactctcatcagctgaaacaggaagggatttacctcataacgggcggtttgggcggtctgggcctgattttcgcaaaatatttggcctctcaatatcaagcaaaattagtattgacgggaaggtcaccgttaactgctgataaacgccataacattgaccggctgcaggcgcttggaggagatgcggtatattatcaagctgatgccgcagatcaaaagacgatgggacgggtcatagaagaaacgaaacggacttggggctccattcaaggcgttattcattcagctggtcatgccgatgatcggttatttacagagatgaatctgactgatttttcagatggcatgactgctaaaattgaaggcacggtatgtttagatgaattaacgaaagatgagccgcttgatttctttatcgtattttcttctatttcttcggtcttcggagattttggacaggttaactatgcgttgggcaattattttcaagatcaatatataaattggagatccgaacagagccgccggcaagagagacaaggcaagagcatttcgattaactggccgttgtggcgtaaaggcggaatgcatttaaacaaagaagcggaagaagcatatctttccgcatccgggtttgattatttggaaacggaagaagggatagcggcttttgagacgattttggcaagtgactgcccgcaaatttcggttgttaccggggatgccgatacgacaccagcaagaaaagatctgccgcatcaaaaagtaaatacgcttcaggttcgtcaagaggaaatttcttacacagcaccggcttatacagacaatgtcctgggagaactgaagcaaatggtatcggaattattgaaaattaacattggacagctggatacggcagagaatttcggcaatctcggctttgattctatcagtttgaaaacattagctgtccgactgaataaaaaatacaagcttaagctgacacctgccgttttctttacttacagccatattaagtctctttcagaatttctaaacagtgaactgcgtactgttgcaaaagggaatacagatgcagaaaaaaatatttctgaaaaaaggaaagtagtgcacgctgggaaaaccaccgggaaaaccgtgaagccgccgcgaagttttccgtttgaaaaaaagacaacaagacaggctgaccatcatccagagaagcagccagttgccattatcgggatgagttgtgtttttccgggatcaaaaaatgcagatgagttttggatcaatttaatcaatgaaaaagatttgattcaggaaattcccccggatcgctgggattggaaaaaatacgccgaaggcaaaggaagcagcgaagtacattcgaaatggggcggctttatcacagatgccgataaattcgatgaggcgtttttcaatattaatccgcgggaagcagaactcatggatcctcagcacagaatttatttgcaggagacctggaaagcgatagaagatgcgggttacaaagcttcaaagctgtctggcaaaaatatcggggtgtttacgggcattcaatttaatgattaccgccagctgctgatgaggcattcggacggggcgcatgcgtttgcgggaaccggaaacagccaggcgctcatcagcaatcgtgtatcccattattttaatttcagaggtccgagtgagtccattgatacagcctgctcaagcagtcttgtagcaatccacagagctgtgcgctcgattcaaaatggtgaaagtgagctggcggtagcaggcggggtttcgctgctcttagatccagtcacgcatatgtatactgataaactcggtattttgtctagggacggccggtgtaagacatttgataaacttgccgacggttatgtccgcggtgaaggtgcagctgttctgttattgaaaccattgcaagcggcaatgaatgacagagacaatatttacggagttctgagaggaaccggagaaaatcacggaggaagatctgcttcattgaccgctccgaacccggaagctcaggcagaactgttaacgtctgtttacaaaaatgccgatattcctgttgatacgatatcttacattgaagcacacggaaccgggacagaactgggagatccgattgagattgaaggcttgaaaaaagcgtttggatcttttgagccgcattcaggaaagaatcatgatcaatattgcggcatcggttcagtaaaaacgaatatcggtcatttagagcccgcctctggaatgccggggctgattaaagtattactatccatgaagtataaaacattgcctgccacactacatgtcaatgaactgaacccttacattcaattaagcggaacaccgtttcatattgtcaataaaactatgaagtgggccagattaatagatcgaaaaggaaatgaaattccgcgccgtgccggagtcagttcctttggattcggcggggcaaatgctcatgtcatcgtggaagaatttgaatacggacaagataaagcagtaactgccgagcgggaacaaatcattgttctttcggccaaaacaaaggaaaggctgatggttaaagccaaagagttaacaatgtttttacatgaagaactatcagttcaattcagtcagcaagaggtacaggaacgtgatttgcaagaggcggttcgggaagcggcagcgggtatcctgcgtttagataccgcagatatagatgcaaagacacctctttcggaattcggatttgatccgttggcttattccgaattaatctcttttataaaccaaatgtacggcacagaaatatcacttgacatatttcaggaattaaatacactgagcgagctgtgccgctatatcagcagcatccggaatcgatcagctgataaaccgtataacggcaattttagagaaaagtccggattcggtcttgaagaaatagcatatacactgcaaaccggaagggaaccatttgaatgccgccttgcgatcacttgctcgaatatcggagatcttcttgaaaaattaaacggttacatccaggggagcaggctgcaaggtgtttacgaaggaaatgtaacggattttgatagtctgtacgctcctttattcggcggccccgaaggtcatgcatatgttcaatcactgattcagcaaaacaagccggccaaactggctcagttgtggacgatcggttgtgaaatcagctgggaagacttgtatgaggaggaactcaaaccggttaaactgtctcttcctctttatcctttcagcaagaacagacattggattcatttaaataaagatgaagcgcagaaggctgaggctttatcgaacactgagcttcacaactcaaataaagatacagcagatggagaaatcatgtcgcttcttgaaaaagcacaaacaggtgagatgaatacgaaagagacgtcagagctgatagaggagttgcttttccatgaatgaaaaaacgatgcaaattgagcaaatcgtgaaaaaggtgaaagaatgcaacctgacgcctgaagaagggctggaattaattaagagcttggggaaaacccatctatatgaaatggtatgggatagatatgaatttaaaggcagtaaaaaattcccgcatacgaaagagccaattttatttttttgcgaagacgacagcatgtataccgtaatgaagagacagcttgaaggttatgaggcgcctttcatttacgtgacttccggcgagcgtttcgaagattgccggaacggtcgttttacaatgaactttgcaaaagatgaggattatgatgcgttatgcggggttctgcgttctcaaaatataagaccccgccatattattcattttttagctgccgggctcttcaaaaatacggaagatgcaatgagaaagcagctcaataaaagtctgtattccttgtttcaaatgtttcaggccttcatggcgaacaaactttgtccgaaagcagaaattttgtatctgtatgaaaatgccgagggcgaggttcagccgatttataacgcggttgaaagttttcttaagaccgtacaggccgaaaatccgaatttcacatgtaaggctgcagagctgaaatcaatgtttgacgagccgtttacaaagcagcatattgcagatgtcatctcttttgaatggaacaatcaatgtaagacggaccgctttacctgttatgagccgaggcattattataaaaggcagcttcaaagagtaaaaaaagaagttggggagaaacatagtttcagtgtaaaaaagaacggtgtgtatttaattacgggaggagccggcggtctcgggtatctgtttgcggaatatctggcgaaacaggcagaagtcaagctgatattaaccgggcgttccccggcctcccgtgaaacggcgcaaaaattaagcgctcttgaaaatctcggcgctgaagccttatatgtcccggcagatatttcaaaggaaaaagagacggacgctttgattaagcacattaagcagacattcggagaattaaacggaattttgcacagtgccggacttgttaaggatgcatttatcataaaaaaaacgaaagaaagcatagaagaagttatagcgcctaaagtattcggaaccgtttggctggataaagcagctgaagaagagcctctagatttcttcgttatgttttcatccctttcggccgttctgcctaatgcgggtcaaagcgactacgccttcgctaacggatgtatggacggattcacccagtatcgaagcattaaaggacgtcccgggaaaacactttctattaattggccgttatgggatgcgggcaatatgacagtcgggccgggagagctgcaggctttaagacatgcagggctggaacttttatccgcccaagcagggcttgccgcttttcaggacagtatgagccgctctgcttctcagctggctgttatcagcggagacaaagatagaataagtgaattactctcaactgaccataaaaagatagagactgtgcctgaaaacaacagtaacctgccgcaattacatgaaaaagatctgaaaaagcaaacggtccgtcttttgacagagatcgtcggagcggaaacgggaagaccggcggacagtattttacccgaggatacgtttgaccgttacggaattgattctctaacgattttaggtcttaactctcgtctggaaaaatattttggaagagtgtctaagactcttttctttgaatacagcagtgttgaagagctgtcagagtattttcttgaacactatcagcatgagttgcagaaggcgtttttaccggcagccgaacagcgaattgatcattcgactccggcgaaacgggagaagctttccgtttcccgcataccatccgcaccttccgaggaagatattgcgattatcggtatagccggccgctacccgatggcgaaggatgtggaagagttttgggaaaatatttcttccggaaaagattgtataacggaaataccgaaagagcgctgggattttcggaaatattatcacacaggtgacaatgcccgtcatgacagcaaatggggaggttttataaaagacgctgataaattcgatccgctgttcttctcaatttcgcctcgtgatgccgagttaattgatcctcaggaacggttatttttagagacagcatggcacacgtttgaagatgcgggttacacaaagaaaaagttgaaacggcataagacaggtgtatttgtcggtgtcacctacagccactatcagttatttgcagccggtgcttcagatgatgaggaacgtcaggcgctcttgtcttcttattcgtctatcgcaaaccgggtgtcatatttctttgacctgcacggacccagccttgcaattgatacaatgtgttcttcttcactttctgctgttcattttgcatgtgaaagtataaaaagaggagaatccaccctcgccatagccggaggcgtgaatttatctttacacccggataaatatactttactttcccaaaatcattttgtttcaagcgatgggcgctgcagaagctttggagcgggaggagacggatatgtgccgggagaaggagtcggggccgttcttttgaaatcgctttctgccgcgaaggctgacggggacaggatttacggtgtgattaagggaacatctgtaaatcacggcggaaaaacaaacggatacactgtgccaaatccgggcgagcaggcaaacgtcatcagtgaaactcttgataaggcggggattgatgcagacagcataagttatattgaagcgcatggcaccgggacatctttgggagacccgattgaaatttcaggtttaaccaaagctttgcacagctcgaaaagcgattatcgttgtgcaattggttcggttaagtcaaatatcggacacctagaagctgcggcgggaattgcttctatcacaaaagtgctgatgcaaatgaagtataaacagcttgctccttcccttcattccgataacttaaatcctaatattgattttgaggaaacaccgttttacgtgcagtctgaactgactgattgggagacgccgcaaaatcaagccagaaggtcaggcatcagttctttcggcgctggaggatctaatgcccacattatcatcgaagagtataagaatgaagaaaagatggaaacggtaaagagcaacaagacgcaaattattctgctttctgccaaaaatgaagaacgtctcagactcttgattgatgcatatataaatgaactggggccaaaaacgtcactagctgatgccgcgtacacctcgcagaccgggagaaacgctatggaagagcggctcgctgttgaggctagcagcattgacgaccttcgcaataagctgacgatgtatttgcggtcagatcataagttaaacggtttatataggggaaaggcccgccgagacgctggtcaaaaggatgccctgtcagccgcccgctttaaaagtgcaagagaaatggccattcactgggtgaacggaggagacgttcaatgggaagagatgtacactgcggaattaccgaagcttatctctcttcccgcatatccttttgaacggaacagatattgggtgcctgccgcaaaagcagcacagaaacagaaaaaaacaggtgtaccgcaaagtctgccccatgcaccgactgacttatcatttgatgtattaaaaaaagcgtggaaaaaacaaaaggctgcgccttccgcttttacgaaaggacaggtgatgatcctggctaatagtgaaagtgagcggcttgcattcgaattgtttgattcagatcctctgattgaatccgctgtcatttgcgcagataactgggatcattcggatggagaagccaaaaaaacggccctagcagtcatagaagaaaatccggaaatcatcggcatgattgacctgtcagatttgcggagtgatcaaaacggggcacgcaccggcacaatcgggaagctgacactgctgcaggaaatcataaagacacgtaaacagcttttcgttttacatgtgaccagagggctgcagacatttctgaatgacaagccgtcgttagccggagccgaaacagccggactatataaaatgctgagtgcggagtatcaaaagataaaatcaaaaacaatagatgtagacggtcatgtcgggactgcggcggaattgagacaggtaatcacagatgaagcttacgctgacgggctgtatagtgaaatctgctaccggaacggtgaacgttatattccatacgtggagaaattacatgcagcggaaataaaccggaaactatccggtctgccagtatgccgtacggatcaaaccctggttattacagggggaacaagagggatcggagcagaacttgccagacattatgccggcaagggagtcaaaaaacttgtgttgatgggagtaaccgaccttccggaatctgataaaatagccggcttgttaaaagacaccgatgaaaagtcacctctttattcgaaattacaactgctgcatgagttggatcaaaagggagttcaggtggaagtgtattccggaccgctcacggaaaaagaaaaattacaacgcttcttttcagaggtgagactgaagttcggcaaaatcggcggggtgattcattgcgctggtgcagccaatcattcgaatccggcttttattcataaatctgatcaagaaataagagaagtatttgagccaaaggtgcaggggatgcaggtactccatgacatttttattgatgacaaacttgatttcttcattttgttttcatctgttgcgagcgcctttcctttattaggcgccggaacaagtgactatgccgcagcgaacgcttttatggattactttgcggcgtatcagcatgcagccggcagaacgtattatcaatcaattaactggccgagctggaaggacattgggatgggcgaggtgaccagtccatcatatcaggcacttggtttactttcacactcaacagaaacaggtattgccatgctggatgaaatgatgacgataaacggatacccctgccttataccggcaaagacacatccggagaaattcaagctggagcagctgcttcagacaagaattcaagctgctaaaaataacccggatgctgaagaaaaagagatctctggtcagggagacaatgaagctatgatcaggaagttaatggagattttttccgcggagctgaaaataccttatgagaatttagatcaggatacgtcttttacggattacggagttgattcaatcttactggttcagcttgtcaaaaaagcggaagatgcatttcaaataaaaattgaaccatcagcttttctggagtatccgagtttttcacaactgggcgtctatttaaacgaattatttgcaagtgagggaatcagtcctcaaattgattcagaaaacattgaggttcggaaaaaagagcaacatataaatcaaaatgcttccgaagtacgggacagcggatctcaaatacaacaaaccagtctgaaccaaatcgctattatcggaatgggctgtgagtttccggaggctccggacacagaaacgttctggacaaacttgaagaaaggacaaaatagtgtccgcgaagtcccggcgtcgcgatgggatatttcttcatactactctgacacctatgaaaagggaaaaagtatcagtaagtggggcggatttcttcaagatattgagtctttcgatcccgcgttttttaatatgaacaaaagtgaggcatcagagcttgatccgttaatcaaaaaatgccttgaggtcagcgtccagactttgagagacggcggctatacaaaagaagaagtatcaaacaaagaagtcggcgtcttcatcggttcgcggaccgggacgtttatgtccaaaataggttccccttcaaaaaatacaatcgtgggtataggacaaaatttcataggcgcgcatatctcacacttttttaatctgaaaggaccgaatctggttgtagacacggcttgttcttcttcattggtcagcgtccatctcgcttgtcaaagcctgatgtcaaaagagtcagatatggcgattgcgggcggagttgacattttgctggatcaaaagccttacgtcatgctgagtgaggctcgggcgctttcacctgaaggaaaatgtcatacatttgatgagaaggcagatggatttgtaccgggagagggatgcggcgcagtccttttgaaaagacttgatgacgcccttgccgaaggtgacagaatttacgcggtaattgactcatccgcggttaataatgacggacagacaatgggaatgacaacacctaatccgaaagcgcaaagcgcagtgataaaaaaagccctgaaaaaaggcggaattgatgcagatactctcagttatgtcgagacgcatggcaccggtacgatgataggagatccgattgaattaaaagcgctgacagaagtgttccgggaggttacggaagaaaggcaattttgcggagtaggcagcgtaaaaacgaatttcggacatttaatgagcgcagcggggatagcgagtattataaaggttgccttatccataaaaaatcagatgctcccgccgacattacattgtaaaacgccaaatccgcgttttaaatttgatcagtcgccattctttccgaacacgtctttaaaagaatggcgtcccagaaaaggggttttgagagccggaatcagttcttttggattcgggggcacgaacgcacatatgatattgagcgacagccatctcacattaggatatggagagacaaaaagacacccgctttctccggttatattcaataaggaacaatgctggatcgacaatggagaaactccagaaaaggaagagtcagaattgctgattcctttacttgatttcaaagaattataaagaaaagaaaaggaatgagacaggtggccagtaatcaaaactatcagttcacattaacaattaaacatacggactatattgtcagggatcaccgggtgcatggcacccggattatacccggtgtcacatttttagatatgatataccgtatggcgctgagcaaaggtttgcctattgaagaactcgagtgtcagaatattttgtatttggaacctgtagcaacatcggatacctttgacagagaaatccgcatccgttttcagggattggaacagggatgggaaattcaggcgaagagcagaaaggtaaaagatgaccgcattctggatgaaagctgggatgagaatatgacctgcaggctcatgcagaaattcccggaaagcatgagttcaatcaatattgatgaaattaaacatgcctccgcccgtgaagatgatatggagatatgttatgactatttaaaaaaggttgatatagagcattttgaatttatgaagagtctggggaaggtttatgcgtctgatcattctgtacttgcagagttaacgctcagccaaattgccaatcaatataccggctattttcaattgcatcccacttttcttgatgcgtctaccatcatatcgatcctttatcaggcatgtcccgaatattttacacaaggatctccggcaagccggatgaaaacgtatattcccattcatattgaatctttccgtatgacgaagcgcctggaagacaggtgttatgtgtacatagagaagcaagaccaaaatcatgattcaggggatgtcatccaagtaagttacggtttgtacgatgcatacggggagatgatcgcttattttacgcggctgtctgtgaaacatattcgctcaaaagatttaattgaaaacctgaagcagactcgtttggaaactgaagcggcttctcagccaaaagacagcctgatcagaaaagattcaatcataaatcgaagcgaaagcatcgagacacaccttaaggaattaatatccggggtttcaaatatagatctgcgtgatataaggacagacattggtttttatgaacagggcctggattcagcttctttgcttgccattgtcaaagaacttgaaaacaaaacaggggaacagctgtatcctacactcctgtttgagcagaaaacgatccgggaactcgccgcgtatattaaagaaaatcaaagaatgtccagttatttcttaacgcgaaatcaaccggctgaaaagcctgacatgaaaaaaagtaagaacgaaaatctttccgctcttataacagaaggagacattcagcagctgatcgcagatatcaaagggactgcccctgaaacactctctgttgtaaaaggtttttatgaacaaggcctcgattccgtaacacttatgcaagccgtaaaggcattggaggagaaaacaggcagggaactgtaccctactttattgtttgagtatccgacgattcaaaaacttgcaaactattttgcagagagcggcgaaaaaacttccgttgaaaaagacctccctcttcattatggagagaatcatacggctttgacctatttaacgccgcattggagacaaaaggctgccgcttgggacccgaattgcggaaataaaaagaaaagaacatgcctgctgtttcaatatgacagagagctttttcattttatgcgggaaaatgctgaaaatggattcgaaaatacacagatcattctcgttttatcagggaatcgtttctcctatcacggagacggtgtttatgagatagatcacagggaggaagctcactttgacaggcttgcagctgatctgaaaaaaaggggacaaatgcccgacaccgtggtttacgggtggccggaagggtcatttgccggcccggaaagaataagtgaacagctttctaagggggcttacccgctattctttttcagccgggcattgatgcgcagcaaggcggaaaaaaaggttgtatcgcttttcctttatccggcggatcataaaaatgatcagccgctttacgcttcagtccatggcgcagggcagtctattgtgcttgagaacccgaaactggcccttaagacaatcgggatatcagtttcagacaagtcatcgttgccggaacttacagctgaaatcatcagagtcgaatctacggaagcgcatccgggagaaaccgatctttattatgaaggaaatgtgcgctgggtccgtgccttacgggaagcagaaccggctccaaactcagatttctcctttaaagaaaacggagtatacatgattacaggaggggccggcggcttaggccttatatttgcagaacatatcgcagcccaaacgaaagccaatattattttagcgggccgttctgaacttacggaagacaaaaagaacaaaatcagccgaatgaaagcaggcggttcttcggttcaatatataagaggtgatttttcagatagccgtgatgcagagcgaatcataaaaaccattaaaaggcaattcggagaaatcaacggtgtgctacacagtgccggtgtgacgcacgacgctttattgattcaaaaatcaaaagatgaaattcaggaagtaatcgctccgaaaataaatgggacggtcttattggacagcttgctgcaaaccgaacctttggacttctttgtgatgttttcatcaagcacctcgatgtacgggaatatcggacagacggattacgcattggccaaccggttcatcgatcttttcgctgagtggcgtgaaggaatgaggcggaaaaaagaacgctccggcgtctcagtagccatcagctggccgctatgggaagacggcggcatgaaagtggataaacaaactgaaaaatggatgaaacaaaaaattggtatggttcctcttagtaaaaccaatgggatcaaagcttttcaagattcactctctctgaacgcatcacagctgatcgtgtttgaaggtgacaaagaaaaattggaatctgcacttcaagataccttcatagaggatgaaagccgtgagatccaaataaatgaaacagctgatacaaggcatgaggacattgccattatcggattaagcggaaagtatccgatggctgaagacttacctgaattttgggagaatttaaagagcggaaaagattgtattacagaaatcccgcctgaccgctggaatatggatgatttcttcagcgaagacagagatatgaaagggaagtcttacagcaagtggggaggttttatcagcggagccgatcaatttgatccgcttttctttcatatttccccaagggaagcagaacttatggatccccaggaaaggctctttttagaaacggccaaacattgttttgaagactcagggtacccgagaaacatgctggaaaagatgaaagtcggtgtatttgtcggtgcaatgtggggccaatatcaactatttgaaggagaagaaaatggagtggctttctcgccggcgtccgtctattcttcaattgccaatcgggtgtcttattattttcatttaaaaggtccgagtttggctctggatacaatgtgctcttcatcactgacctctattcattacgcatgccaaagcatacattgtggagagagcgatatggcattagccggcggagtgaatttgtcaatacatccgaataaatataagttcctcagcatgggacagtttctatcaagtgacggcagatgccggagttttggaaaagacggaagcggttatgttcccggtgagggagtcggggccgtattgttaaaaccattgaaaaaagcaatagaagatcaagatcaaatatacggtgtgattaagggaagcgccgttaaccatggagggaagacgagcgggtattccataccgaatccggatgcgcaggcggaggtcatttcagaagcgcttcgtaaagctgacattgatccgaataccgtcaattatattgaagcgcatggaacgggtacgtcattaggcgatccgattgaaattcaaggactgaaagattcctatcaattgaaccatccttgcgccatcggttcggtgaaatcaaatatcggacatttagaatctgcggcaggaatcgctgcggtaacgaaagtgcttctccaaatgaagaataagcagcttgttccttctctgcattccgatattgttaatccgtttatagattttgatcaggttccttttcaagtgcagcggaaagcggctgaatggaatattccgcaaaacagcaatgctgttcatcctttgagagccggggtaagcgcttttggggcaggaggaacaaacgcgcatcttatattggaagcgtatgagccgccaaaagcttttgatcatcaaagcggccgagtgatctttgttttatcggctcaagacaaacaacggctgataaaatatgcaaaggttatggctgattttctatcagaaaatgaatcgaaggataacaatcataaactgcgtcttcaggatattgcctatacacttcagacgggacgcgatcatatggaagaacggctggcgatagtggcagattccgggcgggtcattgctgaagagctttcagcttatatcaggggtgaaaaaagcagcttaagctataccggtaatacattcgaatcagaagttcacaatgaaatgcctcacgtttgttcagattacgccgaagccgcatccaaatgggtaaatggaagaaagatagattgggagacttttgaggtgaatcggaatgcccgcaggatttctattccgggacaaccgctgatcaaacagcggtattggatagcggaaaaaggggaagcacttgtttcagcggatgtgagtaagccgggtcaccctttcttggggagtaacacgtccgattttaatcagttcagtttcacgaaaaaaatcacccgtaatcatccgttcgcactaagtctgtctgaaggaaacgtgtcctttttcccttatgcatctttggctgaaatggctatcgtcaatgcagcggcggcatttggacaaccggttcaaacattgactgatttattgtggaccgaaagcatgaacggaataactgatatacgggaactgatgattacgctgacacctgagcgcgactttgcgcggtttgacatatatgcaaacacaaaaaatgagaataaagtacgtcttgccaggggaaatgcgcatattgttaagcctgaaagcggtatgtttcctgaagcgcttgatattgctgaagtcaaatcaaaaatgactgaacatccggctgaagcgccttttgtcattgaatcagcgaaaaacagtgacggaatgctgtcgcttcattcattgccggatgagctttatgcaaaaagagagaattttacgatctctcctgaagcgcttgagtccgcgattcaagccagtgcgttttttgtcagcggagaaaccttcccggaattgatcggaatgggagcggcggatgtctatcaccctctcgctcaaaatttttatgtctatactcaaaaagagaaccggcagaacagccgtgatgtaacgtgtcatatgacgtttacagataaaaacggaagcattctggcagagtgcagagatgtgagattcagatatggtcatgaaaaagacactgttcagacggacgacgaactcattcgtctcctgcgtcaattggaaaccaatgatattgatcagaaggctgtattgaaacaattaatgggggaagaatgatgaacggaaaacgtgaacaactcagcgatattcttgatctgattcaaacaggacaaatgtcggctgacgaaggctatgcccgtgtgacatccattcagaatcaaaaatcacgggcatcgaaccatccgcttttatattacaagccggaatggactgaatcgttcattcccagtaagaagagcgtacccttgatgggattgctcctgatttttgcagaaaatgaacggcaaatacaagaattgagcggtttgtttaaggactgtactctcttgtttgttatccgcggaaaagaatttgctgttttacatgatgatacgatttgtatgaaccacgtgaaaaaagacgattatctaaagctgttccgatacattcatgatcattttcagctgcccgaaaagattcttcacttgtggtctgattctcaggctgacatgagtaagaaaggtatacagaaacaattggaaaacggattgttttctcttctgtatattacacaggcgctgattgaactaaaatggaaaaagataataaagctgacgcatatttttcaaacagagaataaagaacaactgccgctgcatcatgctctcggcggattggtgaaaactgttcaccaggaacaccccaattttcactatcagattatcaatatcacgcaatcagagggtgcgggagccgctcttccagcaatagcggatatatatcagagagagtgtgacgaaaaacgggatatccattttgaagtgcgctatgaaaacggcagacgttttacgaaaagctataataaagccggctcattcgatttaacccagccgctgaaacatcatgggaattatctgattacaggaggcctgggcggtctcggttatattctggcaaaacatctgtcggaaaaatggaaagcgaatctcatattgacagggcgctctgatttaactgaagagcaggagaaaaagatcgaatatttaagaagttcaggttcaacagttgaatatatccgatctgatgtttcaaaacaaagtgatgctgaacggatgtttgcttttgcaaaagagcagttcggcaccttacatggagtatttcacagtgccggcgtactccgtgactcttttatcttaagaaagacaaaagaagaaattgatcaagtcacaggttcgaaagtttatggcacgctgtggctggcggaagaaatcaaaaaaatgaaagttgaattacttgtcttgttttcatccacatcggcagtcttcggctcagccggccaatgtgactatgctttcgccaatgcctgtttggatcagtatgcagcagttatgaccgcaaaagagtctgccgaaaggatagtgtcagtcaattggccgctatggacttccggcgggatgaatattgacgatgaaggaatatcctacatgaaacaggaactcggtcttgacccgttagatgatggtgacggaatacaggctctggagaacagcttgtgtcaatcatctgaacagctgattgccctgaaaggccgtaaagaaaagattgaggatgtgctgaagcgtgccggcacaatcagcttacattcagaccagcaggaagatgccgatttgcaaaacgatgaattaagacaaaatatcatcagttatctgaaaaatataatgtcagaggaattgaaattaccggtctcactcatagatgaaaaacaatacctggagaaatacggcattgattcagtaatgatcatgcgtctgaccaaaaagctggagcaaagtatcggcagattgtcgaaaacattattttttgaatatcattcaatatctcagttagctgaatatttcctgagtcatcacagcgaacgaatgatgaaactgctgaaaccggccggcacatctgaacttgtctcatatcaaaaaaagcaaaaaagaaaaccagtggaaacaaaagcgccggtacgctctgaaggagaaggttcaaaagagcacattgcggccgatcccctttctgctgatatagccattatcggtgtcagcggcagatacccgggtgcggaaaacatcagggagttccagaatgtgctgatgaatggacgggattgcgtaagcgaaattcctgatgatcggaaagaaatgctggagggaagctgctataagtggggaggttttctgaaaaatccagaccggtttgatcctttatttttccggatatcaccgaaagaagcggcttttcttgatcctcaggaacgtctctttttagagacagtgtacaataccatagaggatgcgggttataaaccttcagatctgacccgcaaaaaggtcggagtatttgcaggcgtcacatatggaagctatcaatttttcggcgttgaagaatcacttaaaggaaatgaactggccgtcgggtctccattttctgcaatagcaaacagaatatcgtatttctttaactttaaggggccgagtatggcggttgatacaatgtgttcatcctctcttaacgccattcacttagcctgtgaaagtatacgaagaggagaaagcacacttgctgttgcgggcggggtcaatcttacgcttcatccgaataaatatacattattaaatcaaagccgcttctttgcaagtgatggccgatgccgtacattcggcgagggcggtgacggttatgtaccgggagaaggagtgggatccgtacttttaaagccggcggcggaagcggtaagggacggagatcatatttatgcgctgattaaagcgacagcggtcaatcacggagggagaacaaacggttttacggttcctaatccaaatggtcagtctgaactgatacaggacgcgcttcagaaagcttgtattgatcctcgtacaattagttatattgaagctcacggaacgggaacttctctgggcgacccgattgagatcaccgggttaacaaaagcgtttcgggaatttacggagcacactcaatattgttccatcggttctgtcaaatcaaatatcggccatcttgaggccgcagcgggaattgccggtttgacaaaggttcttttgcaaatgaaactgaaaaaactgtttccttccatacatgcggagacgttgaatccaaatatcgattttaaagcatctcccttttatgtacagcggtcattgcaagattggaagaaacccaaatttcaggaaaacggaaaaacagtaactgttccgagaagagcggggatcagctcattcggagcgggaggaacgaatgttcatatcattatagaagaatatgaagaaacaaacgtctcaacagaacatgttgagaacgaaccgcatattgtcctgttatctgccaaagacaatgaacgtcttcttgagtatgccgaaaacatgagagattttatccaacgttcactaagtcctgaagtaaaggataagcagcctgatatgagagaaaaggtgtatgaagtactcaaaccgtttgtttcggaattgcttcatatccatccggaagaaattaatattgctgatcacctgagtgaatttggcgtagggcctttggaattaagccggatggcggattttattaacgaaatgtttcatattgaactcacgatgtatgaattaactgattgcccctccattcaagcggttactgaatacttattgaaggaatatgccggagcgataagaaacctgttcccgaatgaagtgatggaaggcagccaatcggaaagcgtcgttttacgggatctggcatacactacacaatcgggcagagaagcgatggaggccagagcggcgattaccggtacgtctcttaaagaaatcaaagataaattatttgagttttgccgcggtgacaagcaagttccaggcgtatatgttcatcagcaatcagcagatgcatttgctgaaaaaatgaaggcgttaacggaaggcagagcaggtgaattgtttgtaaagactattattgagaacggtgaagcggaaaagctggctcaattatgggtttggggggcggatatcgactggaaatccgttcatcaacatttacagcagccgggtaaacggatctcaattccgacttatccgtttgcaaaagaacgttattgggttccgtccaggactgagaagacagagatccctcagcattcttttcaacatcacttgcaaaaaaaatggagggagaatccgtttgtaaatccatccgaaacaaaagagtacggactgacagtagcatttgtaaatcaagacacagaatcaattgcccgcaccatttgttcggatatagatcaggagaatctgattgtcatcaaacatcactcttcatttataaaacactctgatcaaatgtttgagtgttctttattagatgaaaaccacgcatacgccgttatccgtgagatcttctcgggcggtgagcggcaggtcgaaaatatatttgatttctcagatatcggaaaccagagtgacaatcagaacggcatcccatatggtaaattcttatttatacaagaaataattaagcggagtaaaaaggaaacaccattatccattttacaaatcaccaatggcttgcaggtatttaaagcggaaaaaccaaagctgacaggggcagaatcagcggcttttctgaaagccctttctgcggaatacggctttgttcatgtgaaaacaatagatatagacagcatgaaagaaacgcatgagctgaaacaaatctttgagaatgaaagggcgcaatgtaccggagagaatgaagtatgctaccgcagcggcgtcagatatgttccgtattttgaagaagaaagaatccataccggcgggcctgtttcatttcctgcggataaagccatcgtgattaccggcgggacagggggcattggcagagcaatagctgaagatttggtgaaacggggagtgaaaaaactcgtgctgacgggtacgcgtccattacctttgcgaagtgaatgggatcatttgctgaaagagggcagacaggacgaaaagacagtcagcaatataaaactgtttcaaagttttgaagagaaaggtgtcaactatatgtattacagcggttctctcacaaatgaagagaagctgcgttcattctttcaccaagtaagccttgaatttaaagatataagcggtgtcatacactgtgccggactgcacagcggcggaaatccagcctttattcataaaagaatgagtgaatttaagacggtgtacgggccgaaagtcactggacttcagaatttgaagcggatttttaataataggccgctggatttctttattctattttcatcaattgcagcacagtcacccaaactgtcgaaaggaatgactgattacgcgtctgcaaacgcatatatggactatttcgcggcttatcattttcaaaaggggagaacgtatttcacgtccatcaattggccgagctggaaagaagtcggaatgggtactgtgacgagtcctttatatgatgaattgggactggactctctatccacacgggaaggactggcgattttgtatcatgcactggagagaaaatcggccaatatcattcctatcgtgaaaaaaggaacagtgtttcatgcagacagtctcctgaacatcaataaaaccggcggagcttcggttccagtccgaagacaggagactcccgacacttttgatcattcagaagggcttgtcagtgaactttctgccgtatttgccgaggaattgagcattccccttgaaaagcttaacccaaatacggattttcaggaatacggtgtggattctatactacttgtgagcattatacatcgaatagaagcaatgattcagaaaaaaattgaccctactgtgcttcttgaacacaacacgattcatggtcttgcggaatatatcggtaagacggcgccgccgttgaaaaaacaagtcgaacagactgattctcaaagcagcaatcagcaagatatgcagtctgtgacgagccgaaatacagaaccgcagacggcttcctctgcaaagatagctgttatcggaatcggatgtaagttccctggagcggctgataaagaggaattttgggacaatctgagaaaagggaagaatcatattaaagaagtacctgattcccggtggaatatagaagaaaattactctccggtgcagcaaaagggaaaaagcatcagcaaatggggaggatttatcaatggaatcggcagcttcgatccggagtatttccgcatggaagaggagaaagccatccaaacggacccgctgataagacatttcttagaaacgagtgtacagactgtacgggatgccggttatgaagaaacggaattatcgggaaaaaaagtcggcgtatttgtcggttccagaatgggcggttacggtcacaaactgccgaaagaaagcagcagccacatcgtcgggcttagtcaaaactttattgcttcacatgtgtcgcatttctttaattttcacggtccaagcatggtttctgataccgcttgttcttcttcattagtcagcattcatttagcctgccaaagcataaaaaacggtgattcagagatggcgctggcaggaggggcggatctgcttttggatgaaattccttacctgatgttaacagaaggaggagctctttcgccggacggtcagtgttttacttttgatgaaagggcaaacggctttgtacccggagagggttttggcgctgttctgttaaaaccgctggagaaagcgaaagctgacggagatcagatatacggtatcattgaagcatcagctattaataacgacggtgcgacaatgggaattacgaccccgaatcctaagcttcaagagcaggttattcaagatgcatttgaaaaagccgatatcactcccggatcagtcagctacgtcgaaactcacggcacaggcacgatgattggagatccgattgagcttcaggctctgacaaaagtattccgaagagacacaaacaaaacgcaattttgcggagtaggaagtgtaaaaaccaatatcggacacttattaagcgctgccggagcggcaagtttcattaaagtgattttatcaatatggcataaggaaattccgcctacattgaattgtgaaacgccaaatccccgctttgaatttgaaaagtcgcctttttatccgaatacagagctgagaaactggaaggatggaaaacggagggcgggcatcagcgctttcggttttggcggaacaaacgcccaccttttggtaagcggcctggatgattcatatcattccgtcagaactccgctgcctcctgccgagtttgtcagaaaagagtactggccggattcaaatcggaaaaaacaaatcaaacagaataaaaaacggcttcttgaaattattgatgaaacagagtagcacctgctctgtttctttactttgtaaaagaagaaaggttgtcgagttgcatgaggttcagcgtattagtcaaacatgacgattatattgtttcagaccatgtccttcatcaagtgcgtacgatacccggcgtaacgtatctggatttaataacacgatttttagctgagaaagggatatcaccccgaagttttgaaatcaaacatgttttattccgtgaacctgttgcgacgtcagtccattttgataaaaaagtcaccttccagtttacggaacaagaaaacggctggcttgttgaaacaacaagcaggaaatgggtcgctgaaaaggcggaaggtgaagcgtcagttaacttgcaggcggaaatcataagaaaaaatgcgataaacgaaaagacaatttcaatcgaagaattaaagaaaggggccgtccggacttcggatgctgaatccgcctatcgtaatttgcgcagaggcggcctgattcataaagattttatgaaattggaaggtacagtatatgaaggtgaaaattatattctgggagaggtcagtttaagcggactttcaaaagaatatacagatgacttttacatgcatcccgcatttttggatgggtctctcagcttgttgggaatccttacatcagacttgccggatgaaggaacaaatgcgtttatccctatatatattgagacattccgggcactgcataaaacaactgggtcttgttttgtgtatattaataaaaccagtataacgcagccgccttctaaagacattttatatgcggacatagaagtatacaggcctgatggagagcttgctttttattatgagcgattcggtgtgaaaagagtcagaaatgaaaaatcaatacaaaggctggagcattcccaaaaagctaaagaggtcggcagcgcaacgaacaataaagaaatgatcagaaataatttgatccaagagatagccggcatgattgaaaaacctgctgaaacagtgaagaatgatagttccttttacgagatgggcttggattctaaacaattattagacttatccaaaaaattagaactgatgttagatacaaagctgtacccgactttattatttgattactccacaatcggtgaattgacggaatatctgcaggagaaatacggagccgacattacagactctatctctgatacagttcagcaccaagacagtcataaaacattaacagatgagctgtcatccattattggagaggctacaaacacaccgtcaaataaagcggacaaacaccaatctttttacgaactgggtcttgactcaaaacagctgctgcatatatcgaaaatgctcgaggaaagattggatacacaattgtatccgacattgctttttgattataacaatattcatgatttagcggcttatttagaagaaaaatatgatgtgcgtaatacgccggccgcagcttttaaagaaaaaacgcaaacgaaagagccgcctgaaaagccgatgcttgattccttgtatttacaaaaagaatggatagaatctccattaaagtccggagaagtacctaaggaaaatacattgattttcgatttcgacagttcattgagtgatgaaatccgaaagtacatcggcagtgaaaatgttatttatgcggaagccgccgctgaatatgaaatagtaaatgaaaagcattataaatttaatccggagcagtctgctcattacaccagactgttagaagatatgaaaaagtccggagcgtttccggcgtcaatcattcattacctgtcaaaaaaagcttatactgaggcagcgttagatctgactcacagcttttattcaattctttatttgagtaaagctttgatccatcaaaaagtaaaagaaaacatcaacattctgtacgtacatgacaagggtcaatatacaaatccggtttacgccgcgattggaggcttttttaaaacgctgaatgcggagcagccgaatataaagtgtaaaacggttgagatttctccaagacaaaccattgaaaaagcacctttgcttctcaatgaattaagtgccggacatcatcagtctgtgaaatatgacggcgatcaaaaaaggcgggtgacagcatataaagacgcttcgccgcaaacaggacaaaaggccgccaagtttgcaaaaaacggggtgtatctcatcatcggaggattaagcggcatcggctggattatttcagcgtttctttatgcaaatcacggagccagcgttatcattgccgggcgatcgaaaatgacagcagacatggaagaaaaattagacagcatccgatatgacggggcaagcatttcttatatccaggctgacatgtcagataagcagcaggtcatcaatttagcggaaaaaattcatgctgattattccgaaatcaacggggtcatttacagtgcaggcgtgttaaaagactctctcattatgaataaaacagacgaggaagctcaagcggtgctgcaatcaaaggtcaatggtgtgattcatttggatgaagcgctcagaaatatgcctttagacttttttgttttgttttcttccatctcctcagaaatcggaagtctgggtcaagccgattacgcctacgccaatcgttttctggagcattttgccgagtggagggaatgtatgagaaaggcggggggaagatcaggaaaaaccatcgctgtaaattggcctttctggaaagacggaggcatgtcagttgatcccggcattcaagacattatgaaaacggagtacggacttcacccattagaaaatactgccggaatcaaagcttttgaacactcgcttctcggccaaggccaccagctgatcgtgttatacggagaaaaagaaaaaatacaaaacgatttcaagccgttatccgcccgttcagcaccgcctctggtaagagattcagcgattgcagccgattttgatgcttcgtcagtcgttacgggagaagctgaaagtcctttccggatactcggcacagcttccaatcgtcatctcgacgattatttgcattattggagcagactgaagaaaggagcccttcagcacgatcaaagcgatgccgcaaaaaaacttatcgctttttaccagacagaagaaacggaaaccgttcattttctggcaaacacagaaaatgcccggcatatggaaatattgatgagcggtaagggtgaaacaattttactgatttgcggttttgctaccactgcttacatgtggaaagaacaaatgaaggagtgggcagatcaatttaatgtaattgtcatacacacaccgggttacgggctgagtgaggggagcgccgattttacactgagcgggctggctcagacttttatcgaagtgctgaacgagataggggttgcttggccgatccacattgcggcagcttcttggggaggcatgatagggcagaggatagcctatgaataccctgaaaaagtaaaaacactcattctttccggaagttacaccgcatacgaagaagaccctgaaagcagtgtcgaggaaaaactgaaaaatgattttatagctataggaaagtcgcatgaatatgaaagtttatacagtaatcaattcttaaatgcttctattgaacgttttatgaagatacatcaacaagaaggctattctacaatcggctttttaaaagacattcatacaagaacgcttatccttacgggtgagaaggaaagcgtagttgatcagaaagaaacaaaaaggctgcagaacctgctgagtaatgcagaattaaagaaaattaagggagcagggcatcttccgaacatcacacatccggaagaatttaataaagcggtgtcagaattcatcaagaaatcagtaagtaagggatgaaaacgatacatacagtacagggggagaaaacaatgaaacaaacaataagcaatccggcatttgatatgaaacaaattaacgctcttaacggccattatcagacgatgatagacaatggagatctgcaatgtgcgagttatatgatgtcaagaggaggtgaggtttttgcagctgagtcgttaggggaatttaccggcggacaaaaagaaaagcaaacatttcagcttgatacaatcagagaaatcggttctttgacaaaagtgtttaccgctgtagccgtcatgcagctcgtcgaaaaaggtttgctcgatctgaaaatgccggtcaagctcattttgccagcgtttgataaaccgggtttcggagaaattaaaattttgcaccttttgactcatacggcgggattaagttttgagctggatattcaaaaggctgaaggcattgacttaacgaatgaggaagaatggataaactatctggtcagtacgcctttggagtacggagtggatgaagcatggaactattccagaaccggctttgttatacttggcatcattatttcaaaagtaacaggcgtatcctacgaacagtatgtaacaaagcatattattgaagcgctcggattagacagaacgtatttttatgtgcctgatgctttaaaagaagaagtttgtgtgatcaatgagcacgagtgcgtacagctggaaaaaagtcatcacccgtattttccgaataaagcgacaagcggtctgtactcttcgttgcgagatatttggaagttagctgaaatgtttagaaataaaggcagattgaaagataagaagctgcttggaagaaaaacagtcgaggcgatgctgagaaatcaaataaagcccggtcttcctttttacttcttcggagcgcccagagaggaaggcggctttggtttaggcattaatttgtggccggccggtgaccattatttcatgacagaaggcaccttctcacatcttggaatggggtggtgcggcatgttttctgatccagccgaagattttacgtatgtatttttcactccgatttccgagtttcatcctcatgccgtgctgacgccgctgaatatcgtgtgggcgggtattgaataattgtcaaaagcgtcgtcccgtctgtccggcaggcgggacgattgctaactgcccgtttttatcccgcggcatcttttcaaagcccgccccgaagttaaataacttaatttactctttgtaattttttttaattatagtacagtagagcatttttataatacagtttaaagtcttttatagtacagtttggcgcaatatgatcttatgttttataagcggtttcaaaatgaggttataaataattgacggctttgtttaattactgtaaactatggttgttgatcatattgtactaataaaaaatctttttttattagtacagtttaaacgtcattatctttgcttaagcgctatgtgaatttctgaatgattaattttagaattgcagagcatgataagactgtttttaatacggatggctaaacggtatcctaaccctgttaaatcaaaagaagaggtggtttaaaaaatggctgcaaagacaaaaacttcaattgttgatagcaaaaaacaatttgatgctattaataagcagtttgaaacgttccaaattttaaatgctgaaggagaagtcgtaaataaagacgcaatgcctgatctttcagatgatcagttaaaggaattaatgagaagaatggtgtatatccgcattttagaccagcgttcaatttctctttcccgtcaaggacgtttaggtttctatgcaccgacagcgggccaggaagcttctcaaattgcatcacacttcgcgcttgaacaggacgactttatccttccgggttatcgtgacgttcctcagctgatttggcacggtcttcctttacaccaggcattcctgttctcaagaggccattttaaaggtaatcagatgcctgagggagtaaatgctttatcacctcaaattattattggtgctcaaattatccaaaccgcaggtgtagctttaggtcttaaaaagcgcggtaaaaaagcggtagctattacttacactggtgacggcggagcttctcaaggtgacttctatgaaggaatgaactttgccggagcatttaaagcgccagcgatcttcgttgttcagaataaccgctatgcgatttcaactcctgtagaaaagcaatcatccgcacagacaattgcccaaaaagcagttgccgtcggtattacaggtgttcaagtagacggaatggatgcactagccgtttatgctgcaaccgcagaagcacgccagcgcgcaattaacggtgaaggtccgactctgattgaaactcttacattccgttacggacctcatacaatgtccggtgacgatccgactaaatatcgtacgaaagaaatagaaaatgaatgggagcaaaaagacccgctcgtacgtttccgcaagttcttggaaaacaaaggactatggtctgaagaagaagagaacaaagtgattgaacaggccaaagaagaaatcaaacaagctatcaaaaaggctgacggcgaatcaaaaccgaaagtaacagagctgattgagaatatgtttgaagagccgacgttcaacttgaaagaacaacttgaaatttacaaagcgaaggagtcgaagtaagccatggcgcaaatgacaatgattcaagcgatcactgatgcgttacgcacagaactgaaaaacaatgaaaacgttctgcttttcggggaagatgtaggcgttgccggaggcgtattccgtgcaactgaaggccttcaaaaagaattcggtgaggaccgcgtatttgacacgccgcttgctgaatccggtatcggcggtctcgctctcggtttaggcctgcaagattaccgtcctgttatggaaatccaattcttcggattcgtatatgaagtaatggattcaatttcaggacaaatggctcgtctccgctaccgttccggcggacgctggacttctccggtgacaatccgttctccattcggcggaggggttcatacacctgaacttcacgctgacagtttggaaggccttatcgctcagcagccgggtattaaagttgttatcccatccactccttacgatgcaaaaggactgttgattgcctctatcagagacaatgatccggttgttttcttagagcatatgaaactttaccgttctttccgtcaggaagttcctgaggaggaatacacaatcgagctaggcaaagctgatgtgaaacgcgaaggtactgacctttctatcatcacatacggcgcgatggttcatgagtcgcttaaggctgctgaagagcttgaaaaagaaggcgtttctgctgaagttatcgaccttcgcactgtaagtccgcttgatattgatacgattattgcttctgttgaaaaaacaggccgcgcaattgtcgtgcaagaagctcaaaaacaagccggcatcgctgccaacgttgtagctgaaatcaatgaccgcgcgattctgagcctggaagctccggttctgcgtgttgcggcgcctgatacagtatttcctttctcgcttgctgagagcgtatggcttccaaaccataaagacgttcttgaaactgcgaaaaaagttcttgaattttaatcaggcatcataaaagacggtaaagagagtccttttctcttatatgaaggagtctgtttactaggttcaatgcttgcgaatgcataactaaaatttgcttaatcaactaggaggtcgaaaactgtggcatttgaatttaaacttccggatatcggggaaggtatccacgaaggcgaaatcgtaaaatggtttgttaagccgaacgacgaggtagaagaagacgatgttctggctgaagtgcaaaatgataaagcagtggtagaaattccttcacctgttaaaggaaaagtattagaattaaaagttgaagagggaacagttgcaactgttggacaaacgattattacgtttgacgcacctggttacgaagatcttcaatttaaaggaagccatgattcaggagatgcgaaaactgaagctcaagttcagtcgtctgctgaagcagggcaggatatctctaaagaagagactcctaaagagcctgcaaaagaaaccggcgcaggacagcaggaccaagtggaagctgatccgaacaaacgcgtgatcgcgatgccttccgtacgcaaatatgcccgtgaaaaaggcgtggatatccgtaaagtaacaggttcaggcaataacggacgtgttgtaaaagaagatatcgacagctttgcaaatggaggagcggctcaagaagcggcaccgcaagaaacagctgcacctcaggaaacagctaaacctgcagcggctcaggctcctgaaggcgaattccctgaaacacgcgaaaaaatgagcggtatccgtaaagcgatcgcgaaagcaatggtgaactctaagcatactgcaccgcacgtaactcttatggatgaagttgacgtaacaaatcttgttgctcaccgcaaacagttcaaacaagttgctgctgatcaaggcatcaagctgacttatctgccttacgtcgtcaaagcattaacatccgctttgaaaaaattccctgttttaaacacatctattgatgataaaacagatgaagtgatccaaaaacattacttcaacatcggaattgcagcggataccgaaaaaggcctgcttgtgccggtagtgaaaaatgccgaccgtaaagccgttttcgaaatctctgatgaaatcaacagccttgctacaaaagcgcgtgaaggcaagcttgcacctgcggaaatgaaaggcgcttcttgcacgatcacaaatatcggttctgccggaggccaatggttcacaccggttatcaaccatccagaggttgcgattctcggtatcggccgtattgctgaaaaagcgatcgtccgtgacggtgaaattgtagctgctcctgtcttagctctttctctcagctttgaccaccgtatgattgacggagcaactgcacaaaatgcgttaaaccacatcaagcgtttactgaacgatccacaacttattttaatggaggcgtaatgttatggtagtaggagatttccctattgaaacagatactcttgtgattggtgcgggacccggcggctatgtagctgccatccgcgctgctcagcttggacaaaaagtaacagtcgttgaaaaagcaactcttggaggcgtttgtctgaacgtcggctgtattccttcaaaagcgctcatcaatgcaggccatcgttacgagaatgcaaaacattcagatgacatggggatcactgctgagaacgtaacggttgactttacaaaagtccaagaatggaaagcttctgttgtaaataagcttaccggcggtgttgcaggtcttttaaaaggaaataaagtggacgttataaaaggggaagcttatttcgtagacagcaactctgtccgcgtaatggatgagaactctgcgcaaacatacacatttaaaaacgcaatcattgctaccggttctcgccctatcgaattgccaaacttcaaatatagcgaacgcgttctgaactctacaggcgcacttgcgcttaaagaaattccgaaaaagctcgttgttatcggcggcggatatatcggtactgagcttggaacagcgtatgcgaacttcggaactgaattggttattttagaaggcggagatgaaattcttcctggcttcgaaaaacaaatgagttctcttgttacccgcagactgaagaaaaaaggcaacgtagaaatccatacaagcgccatggctaaaggcgttgaggaaagacctgacggcgtaacggttacattcgaagtaaaaggcgaagaaaaaacggttgatgctgattacgtattaatcactgtcggacgccgtccgaacactgatgagctcggccttgagcaagtcggtatcgaaatgactgaccgcggtgtcattaaaacagacaagcagtgccgcacaaacgtaccgaacatttacgcaatcggtgacatcattgacggacctccgttggctcacaaagcgtcttacgaaggtaaaatcgctgccgaagctatttcaggagagccggctgaaatcgattacctcggtattccggcggttgtattctctgagcctgaactggcttctgtcggttacactgaagcacaggcgaaagaagaaggcattgaagtcgttgcagctaagttcccgtttgcagcaaacggacgtgcgctgtctcttaacgaaactgacggcttcatgaaactgatcactcgtaaagaagacggtcttgtaatcggtgcgcaaattgccggcgcaagcgcttctgacatgatttctgaattgagcctggcgatcgaaggcggaatgactgctgaagatatcgcaatgacaattcacgctcacccgacattgggcgaaatcactatggaagctgccgaagtagcaatcggaagcccgatccatatcgtgaaataataatgtaacaaagaaacagcccccgtttgtaaaagcgggggctgtttttattgtgcaagcacatgctgcataggtttgatgatatcctcttttttctttacggatccctcaatcttcatgaccacatgccgatgattgatcaccatcagcgcagggaacgtgttgatttcctcttcccatccctttctgttgtcataaaccttcatttgatcgacatgatggggatatttcttttctaaatcaaggatcgcatcgtaataaggcacttctttatctatatgattttcatcggaaaaaaacaagatttgagtgtgatgaatgctgtcgatccggttttttgtgaatggactgacagtagaaaccgaacagcttgacagaacgaacagcatcaaaaaaaagggaatcaccgtacggtagcgcatctatcttactcctctgttttatataatatatgggttcatccatttataaggactatatcaagtgtatcacgagaggtgaaaaacctaaggcttgttactgaattgttatataattgaaaccgtttttaatgaagaaataatacgtgtgacaacttgcgcagccgatgtgtaaaaaaggcacattgtttttcgtgagagcgctgttttttcgttatactgggagcaaaaccatatcaggagggattgtcatgtataaagccgctgcagctgtcatatgtatgtgcttactcgccggctgccaatcaaatgaaaagatgcaaacaaacaaaccccattctcaagccgcggccaatcatgccaaacgggaaaaccaccatacaaaagaggaaaaacagaaaaaacagaaggcggagccccgttactatatcaatccgaaaagctttgctgtggaaaaaatggatgaacagaaagagaaaaaaccgatcgcattggtaacgatcgatgacgcgcctgatcagcatgccgctgagattgcggacaaactgcacgatctcaatgcgtcagcgatcttttttgtaaacggacattttttgaaaaaagatgaaaataagaaagcgcttaagcatattcatgagttaggttttatgatcggtaatcatacaatgactcatcaaaacttaaaagatctttccgaacaaaaacaacgggaagaaatcattggcgtcaataaagcggttgaaaaggtaataggagagaaacccgcatttttcagggcgcctttcggaagcaatacggactacagtgacagacttataaaaaaagaaggtatggtgaaaatgaactggaccttcgggtatgattgggatcagaaatatcaatccaaaaaagcgcttaccgatatcacactgaacagtccttatctgcgggacggggccaacatattgatgcatgaccggaaatggacggcggaagccatgccggacattgtaaaaggattgcgtcataaaggatatactgtgattgaccctcgagctataaaaagaccgtaaaaaataaatgtgttatacaatttatcagttgacatattaaatgtgacataataatataataacaacaagtgaaaattaagcgttttcaaattctgagaaatggggaatgacagatgggtacaattgtttgccaagactgtaacgaagcgattcattactttgaggatgagaaggtcacgacgttatacggaacatgctgcggacaatgccagtgtcatcttgaagaagagtaaaaagcgtaaaaaggcccgaaacgatttcgtttcgggcttctttatgtttattggatggctttttgctctttgatgactctgatcatttcaagcgttgcatcttcgggaccctgcacaggaaggccggcgtccaagtttttaaaaatgtagctgatattttcttcagtaatgatctcacccggaataaagatcggaattcccggcgggtacaccatgacaaactctgcgatgatccgtcccgcggattcttttaacggaatgacttccgtatttgcgtaaaacgcgtctcttggcgtcatcgctaacagaggaatttcaggaagcagaacttcggtttgctgatgagcatagtcattggcggaagcctgttttgaaatgtctgtaagcgcgcttacaagacggtcggcatctcccgctctgtcgccgggggtgaaaatacataaaatattatacaaatcggacagctcgacttcgatattatatgattcgcggagccatttttcaacgtcatgacccgtcaggccgaggtttttgaccgaaatgattaatttagtcggatcataactgaaggcagctttagaccctgtgatttcttcaccgacacagcggatgccttcaatttgattgaggcgttcccgtgtctgatccgccagcagaatcgtatcttcaagaaggtcgcggccttctgtagcgaggcgttttcttgcgacatccagtgaagcgagaagcagataggatgttgacgttgtcgtcagcatgcttaaaatcgactgtactctttctttggaaacaagaccttctctcacatttaaaatggagctctgcgtcagggagccacccaatttgtgcacgcttgtggctgccatatcagcgcccgcctgcatggcggacagaggaagcttatcatgaaaatgaatatgcacgccgtgcgcttcatcgacaagcacaggcacatcgaaagaatgcgcgagctttacaatgctgctcaagtcagctgccacaccgaagtacgtcggatttatgacaagcaggccttttgcgtcagggtgctccgtcaaagcccgctcggcggactcaagcgtaatgccgtgagaaattccgagctcatcgtcaatttccgggtgaataaaaatcggcaccgctccggaaaatacaatggccgacataatggatttatgaacgtttctcgggatgatgattttatctccgggtccgcatacggccatgaccatcgtcataatggcgccgctcgtcccttgtacggaaaagaaggtatggtctgcgccgaatgctcgagcggccagatcctgggcttctttaatgatgccctttggcgcatgtaaatcatccaggggttcgatattaattaaatctatgcttaacgcgttttctccgataaattgtctgaattccggatccattcccgcgccttttttatggcccggaatgtggaattggacaggctgtctgtccgcgtgctttttcagtccgctgtacaggggtgtttcatgttgcggcaattgttttcccacctttatcataatacctacggattagtttgtattacattcagttttattacccgttttttaaacgtaaaacaaatgaattatattatgaacttgaaagaaagtaaagaacaatttatgatctatggaagatgcttattttgagcatgattataaaggagtgaagacatttggaatatcaatatccgatgaatgaggactggacgacagaggaggccgtggatgtcattgctttttttcagcaggtggaaaacgcctatgaaaaaggagctgaccgagacagacttctgaatgcgtaccgccgctttaaagaaatcgttcccgggaaagcggaggaaaagaaaatctgcagccaatttgaagctgacagcacctattccccgtatcggactgtgaaacaggcgaaacaatcagatcaagcgattatcaaaatgtagacaaagcgagccggcaatcggcccgctttttatgttatgagactttctgagtcagtgtgtataaaaaggaaagcttcctaaaagcatcttcaatggtttgcaggaattcattgttgttcatgttgatcacgtcttctttttgcagctgaatgccgcacaaaagctctgcttttttcactgtctgcaggcgttcaaataatgttttcagctgctcctgatccatgtcggactgcttgtacgcccctggcttcgtatgatccggcgaccatacaaaatgaccgggaatctgttttgtgatgtcctcctgcttcgcttccagcaatctgccgtattcctcttttatcggagattcataaatgatggcaaaccatacaaacatatgggtgtcccataaaccgatctgaaagtgagggagtttcttatacccgcgtttgctgttggcaaaggcaacccagctgtcagccggcgggttgacagatcttctcgcgtgcttggcgacatgcgggaacatttcatcgcctgtcaatgctgacaatgtcggtgcgaaatgctctcctaacaaggtcagcttcggacggacttgttcttttaacacctccatgcgcggatctaaaccttctattgtaaatgtatcgaagtcttcttttgtaaaacgcatctgagtcatctttttcctccttatcgtaagtattcatattttaccacagccgccgccggccgcaaaaacattgagaacgtttgagccgagaggattggtggtaaaaaacgaataggtaaacacacaattttaagaatgttgttacagccgaatataagtttccatacgatataagaagtatcattaataaattggaaaaatgggatgcttttttaacaaatgatctctggaaggggcgaaagacaatgaggcaagtggtgaaggaaggattcagggaggaaaaaaataaccgtgtagctgtctggagactagaggttgattatgaattggcaaccctgtatgaggccatgcaaaaagagaatgaagatcaaatcgatctcagcaaaagaaaactggaacgtctcagaaaagaatggattcggcttaacggataaagaatagtaaaaacgaaccgcaggaaatggttcgtttttacgtgagaaggcatttttttcattttccttgctttttcatcgcctttatcagtatgctatagaataagctatacatagaaaagaggtacacggtatgacaaattggacggaaattgatgatatcgcaaaacaatgggtaaaagaagccggaacgagaatcagacaatccatgcaggaaagcttgacgattgaaacaaaatcaaatccgaatgatttagtcacaaatattgataaagagacggaacgctttttcattgaccgtatacagggaacttttcccggacaccggattctcggagaagaagggcagggagataagctccgctcccttgacggaatcgtctggatcattgatccgattgacggaacgatgaattttgtccatcaaaagcggcatttcgcgatctccatcggcatctttgaagacggaaaaggcaaaatcggcttaatttatgatgtgatgcaggacgagctgtatcacgcattcagcggaaaaggggcttatctgaacgacacgccgcttgctcctttaaaagaagcttccattgaagaagccattattgcaatcaatgccacatgggtgacggaaaacagaaggattgacccgagtattttggcgccgctcgtaaaacgggtcagaggaacgcgttcctacggttcggcggcacttgagctggccagtgttgcggccggccgcattgacgcatacattacgatgaggctcgcgccgtgggattacgctgccggctgcgtgctgctgaacgaagtcgggggcatttacacgaccacagacggcgaaccgtttacgtttttagacaaccacagcgtgcttgcgggcaatccggcaatacataaaattatctttgacgactatttacatgctgacaggtagagattttgaagaagaagatctcgggtttctggagcagctggcggctgcacacccggtgtggaaaaacgaagagttcggaacaaaaaatgcggcggagtttatgcttgcatactccatgtacaatggaacgtggctcgtatgggagattgacggcgctcctgccgccgtcagttttcatttggaatgggcgccttcaaacggaaaaccgtggctcggaaccgtggccgtcgctccggaggcaaaagagaaaggaatcggacgcgcggtcattgaaaagattgcgggccggctgagaggggagcataaagcgatgttttcagccgttcccctggacaggcaggaatgggttttgtttttaagccaatgcggctttgaacagcttaagcttgaaaaagacgatcgggaaaagacatatatgatcatggtgaagccattgtgaaatgtttcagatataaaaaagagaccggatttctccggtctcttttcttgtttacaagccgaccgcattccaggccgcttctacgcttgcagcgtcttgagagccgtaaaggtcccgcgctgattgaatcaaagctgcttttgcatctttaaagtttgatgacggagtgagatataccgttagtgcgcgatagtaaatctgctccgcttttttcacgccgatttttgtaatcgtgttgtaagcggctttgttcggaattccgctgtttgtatgcacgccgccgtagtcgccggcatcagtgttcggaaggttttgataatttttgtaatggtcgggctgtccgtattttgtcggagtggataaactgcggagagccggctggctgaccgtaatatcttcaccgatatcccagtcctcagtatcgttgaagtatccgaatacatcagagaaggattcgtttaaagcgcccggctgattttcatagttcaggttggctgtttcctgtgtaacaccgtgtgtcatttcatgggccgttacgtccattgaaccggaaagaggcgagaagaatgagccgtcaccgtcaccgtaaatcatttggtcgccgatccaggccgcgttattgtatttgctgccgtaatgaacagaagatacgattttgccgcctttattgtcgtagctgttgcgtttaaacgtctgatagaaataatcgtacactttgccgagattgtaatgcgcatcaacggcagcgcgctgagaagaagttgtgaactggttggtagtgcttgatacgagcgtgcccggcaggttatactgtcggttttgcagatcgtacgtaataatttgcgttccggtaggtttagaaagatcgcgcattacatatttgccgctttcagaagaaatatttaatgagaccgtttttcctttaagagtcgtacctgttccggttgcagcggcatgctccactttgttttgctttttcaggactttccctgtctccgcatcaacggttacttcccagttagctggttccggttcgatgtagcggatggttacatcataggcgaggcggtatttaccgtcttttgtggccgctgctttcagctcggctttgtttttgtttgcaacgttgccgttagagacggcttcaggtgatttgccgattgctttaaaagcatgatccagcgcctgatttgcagataattttttgctgtttgccgttttggcagaagcatcgttgtttaattcaccgttaatcgcatagacattgttggatttatcgatgtgaataatgacttgcgagtctttcacaggcacaccgttaacgacaggcacataacggaagtgcttgtagccgagatcatcggtcgtgtggtcaatcagcttcagtctctcagaagggttgcctttgaagactttgccgttttgtttcaagtattgcttgattgctttgtcactgactgaaggcaactcagactgcaccaaagaatgcttcggcacaaagttcgtcaggttttctttaagctgaggattctcagcggcctgaacacccggaagactgatagttaaactcataaaggaagcggcgacagcaacagacaatttcttacctaaacccacaataaatccccctttttgaaaataatgaaaacttatattgttataataaaccagcattctctcattctgcaatataaaactagactccgctgatgaattgatagaatcgtcccggaaaggcttccggcggccagcatcgggggataagccgagaggcacgtgttgaatcagacatgagtcgaatgatgcgatttattctgaaaaaaatgacaaatgaagtcgggaaaaatgataggggaaaaatgttccaatctgtaaaactttttttatagccgtttgtctaaacaggtgaggccttaataaacgaaaaggattgtttcagatgtcagagattttcagtcattttattcagcatttcgacaggtatttcaagagctgtcttacgaagagattgctgatgttttggactggagtctgtcgaaggtgaagagcaccctgtacagggcgagaatgcagctgaaacagcacttggcggaaaaaaggaaggacggacagatatgacttgctgtttagtgagagatttactccctttatatattgaaggcgattgtgaaacagaaacggagcggtttatttcccgccatcttgaatcatgcggtaagtgcgggagtttatatcatatgatgaaggagccgtttgacctcggcagccctgagatgaaggcgccagcctgttatgcagaagaagaaaggcggtttaaggaacggtattacgggaagctgctgataaaagcagcctgtttgttcggcgctgttttctttatcatgctggtccttaaactgctgatttaaaaaaacgcccggctgaatgaccgggcgttttaatccgtttactcagccggatgaaaggctgtataaatgccttcaagcaattcctggggcagtgaattaaagaatccggcacacagctttgcttctttttttcctgctcctgctttttcagcaagttcctgatcaaacgtatacacaccgtcttcttcaatcagcgcagattgaaggatatgaagactttgggaaaaagtggtgaacagctgatcaacgataagggcctctttttccgtaaagccgagctccaccgctttttctttattaaatgtatattcgccgtccgttttctcaatacattgggaaagtacggttaaaaattcggttgaactgtcccacagcttttgaatgatctgggcttgttcttgatctaatcccaattcaaccgctttttcaccgtcaaaataatagacaccgtctttttcgtaaatcgattggctgatgatgtcaatgagttttgccgcgtcttccggtgttttctcagcggaagcctgcaggacatgcggttcatttgcctgaatcgtttttgcgccggcagaatcaagcggactgaatgcaagcaaggcggctgaggcggttgcggcggcagttacagcggttttcttcaaaaaagatgttttcatttcgttctctccttgtcatgtgtatttgcttacagccacaagtataaaaagacaatgatggaattgaaataggaggtatggtattttctgcataacgatgccggactatttcagactgcatattctgagggaatctgctgatgtaactagaatgggagctgtcatttccggcttcctgactaggcggcgggggagataagccttacatctcagcctgttttgaggatgtaaaaaagcctgaatctttgattcaggcttcattagatattttctttccatgtttacggaattttgcaaagggtcatgcttttaatcaagcagtccctgttcgcgcatttttttctttacggtgaaaccgcttcccatcatggcgataacgagaacaatgcttccgatgatgccccatgcgcttttctcagcgattgatacgccgatcagcatcatgctgaagactgctgcgaatgcaaataataataaaagccaattcaattttttcatatttccatcccctttaacgtcatactttcagtttacagaaaaacgtaacgcttttaaagaggatgtgtggtataatatgaaagttatctaatttttttaggagatgaaaatgtgaaacttcgaaacgatcttcgcaacatcgcgattattgcccacgttgaccatgggaaaacgactttggtagaccaattgcttcaccaagccggaacattccgtgccaacgaaaatattgccgaacgcgcaatggattcaaacgatcttgaacgtgaacgcggtattacaattcttgcgaaaaatactgcgattaactataaagatacacgcattaatattttggacaccccgggacacgccgacttcggcggagaggtagaacggattatgaaaatggttgacggcgttctgttagtcgttgacgcatatgaaggctgcatgccgcaaacccgtttcgtactgaaaaaagcccttgagcagaacttaaatccggttgtcgtcgtaaacaaaatcgatcgtgatttcgcccgcccggaagaagtcattgatgaagtgcttgatttgttcatcgagcttgacgcaaacgaacaacagcttgagttccctgtcgtctacgcttctgcgattaacggaacggcaagtctggatccgaaaaagcaggacgaaaatatggaatcactgtatgaaacgattcttgaacatgtccctgccccggtagataacgccgaagagcctcttcaattccaagtggcgctgcttgattacaatgattatgtcggccgtatcggtatcggacgcgttttccgcggcacgatgaaagtgggtcagcaggtttcattgatgaaacttgacggaacggtaaaatcattccgtgtaacgaaaatcttcggtttccagggattgaaacgcgtggaaattgaagaagcgagagcgggagacctcgttgccgtttcgggcatggaagacatcaacgtcggtgaaacggtttgtccggctgaccaccatgagccgctgccggttctgcgcattgatgagcctacgcttcaaatgacatttgtcgtaaacaacagcccgtttgcaggccgtgaaggcaaatatgtcacagcccgcaaaattgaagagcgtctgaacgcgcagcttcaaacagacgtcagtcttcgtgtcgaaccgactgcatcacctgacgcatgggttgtttcaggacgcggtgagcttcacctgtccattttaattgaaaacatgcgccgtgaaggctatgagcttcaagtgtctaaacctgaagttatcattaaggaaatcgacggcgtaagctgcgagcctgttgagcgcgtgcagattgacgtgcctgaagagcataccggttctgttatggaatcaatgggtgcgagaaaaggcgaaatgcttgatatgattaataacggaaacggccaggtccgcctgatctttaccgtaccttcacgcggactcatcggctattctactgagtttctgtcactgacacgcggtttcggtatcctgaaccacacgtttgacagctatcagccgatgcaaaaaggccaagtcggaggccgacgtcagggtgtgctcgtttccatggaaaacggaaaagcgacatcttacggaattcaaggtattgaagaccgcggcgtcatcttcgttgagcctggaacagaagtatatgaaggcatgattgtcggtgaacataaccgtgacaatgaccttgtcgtcaatgtcagcaaaatgaaacagcagacaaacgtccgttccgctacgaaggatcaaacgactacgattaagaaagcgcgcattatgtcgcttgaagaatcactcgagtacttaaacgaagatgaatactgtgaagtaacgccggaatccatccgtttaagaaagaaaatcctgaataaaaacgaacgtgaaaaagcggcgaaaaagaaaaaaacagcaggaatgtcttaatcacttgcagaatttgaaaaggtagaacccgaacggaaaaggggagggggatccttttgaatgaagtaagtgaacggctgtcgttctttgcggctctttaccaagtggatgagcatccgctgacgggaatgtggctgttatacggaacgatcgtcgtgctttcggtgattgtatttaaactcggctttgccaaacggctgccggtgttgaaggctgcggcagtttatctctttctcgtgctcggctgcaccgtgctgacttttttcggtgtgtttctgccggtcggagaagggcttgttgtcgccgccttgattttgatcgtttacaaaatccgtctgcaccagtccaaaaaaagccagtcagctaaaccgcaataaaaaaatgaccttgccttccggcgggtcattttttattcggtttattttttcagtttatcttttttcgctttttgtccgggatgaaaggaaaagtgtccggtattcagccgcgcctccgttttgactttgattcggtcatggcattcccggcacatatatgtatgaatcggacgattgcggaggcgtttggctgtcagtgtttcatcatcaatttgttcgattttgtcgcaaatggaacattttactctcattgattttcacctctttcactatgacaagcattataacatggatgcccctcctgccaaagggaaagaaagcagcgcccttcctttggagcgggcgctgctttttaccggcggtttttcatatgatgatccgattgatcgttctgttcgttttgcagcttgttctggtctctttcgttcagctgatcatcattcgattgagtcggtgattctttttcattgtcggtcacatcattcgggacttccggcatgacacggccgacgatggcggcaagttcgtccaaaatgcctgaaacggggcggccggccttaatgtcgctgcccatgcctctcagacgggaaaccgtatcaggatcagccacgacaacggcattggcgccgtaaggatcgttttttaacgcctgggcaaccgtgtatttaatgctctccactttgcttctttctaaattgtcatccacatcgataccgacaacggagtatcttccgagtacaaccgcggtggcatctgaaatgccggggattttttcggttacctcgacgagatgcttagcgatgtctgtccggccgggattttcagctgtctcaggagccgtatttttcacatggatcggttttgcatcgcgctgatcggctgattcgttctgaatattgcggccgcggccgtcctgtacagcagtgcagccggtaaggataaacaaggcttgtatgataatgaaaagaattcgcacgtcagatttcctccttgaatgctttcatttattttattgttgaattaaccttctatctttattcaccaaatcatatattttagcaggcatccccgtttttcgcggaaagagaagcacacgatgggctttgatccttatttcaggaggctgagacttgagtaaaatttatgtgttagatacgaatgtacttttgcaggatcctaacgccattttttcctttgaagaaaacgaagttgtcatccccgccgtcgtgctggaagaggtcgattcaaaaaagcggtatatggacgaggtcgggagaaatgcgaggcacgtatctaagctgatagacgggctcagggagaaaggaaggctgcacgagaaagttccgcttgaaagcggaggaacgctcagaattgaactgaaccaccgatcatttcaccagctccaagaaatttttatcgaaaaaacgaatgataaccgcattttggcggtggcaaaaaatttaagccttgaggaggaaacgaaagaaaacggccgcctcgtcatcctggtcagcaaagatgtgcttgtcagggtaaaggcggatgccatcgggcttttggcggaggactttttaaacgacagagtcgttgaccatgatgaaatatatagcgggtacaaagatatatttatgaataaagagcggtttgcctcgttttataaagacaaacaaatttcagtcaaggagcttcagcagcatcaggtttatccgaatcaatttgtgctgatgaaagatgaattaggaggatcttcgtctgcggtcggcatgacagataagaaaggcgagaccgtaaaaagactcgttttcgatgatgagcacgtatggggtatcaggccgaagaacgtccagcagacaatggcgcttgaactcctgctgagggaagatatcccgcttgtcaccctgatcggaaaagcgggaacgggaaaaaccttgcttgctctcgcggcagggcttctgcagacggaggatctcggtatttataaaaaactgatcgtcgcgcgtcccatcgtcccggtgggaaaggatatcggatatttgcctggcgaaaaagaggaaaagctcaagccgtggatgcagccgatctttgataatcttgaatttttattcaatgcgaaaaagccgggtgaacttgaagcgattttggcaggaatcggatcgattcaggtggaggcgctgacatacattcgggggagaagcattccggatcagtttattattattgatgaggctcagaatttgacgaggcacgaggtcaaaacgcttttgactcgggtgggagagggcagcaaaattgtcctgatgggcgatccggagcaaatagatcacccatacttagacagtttaaacaacggacttgcttatgtggtagaacggtttaaagaacaaaccgtctccggcagcgtgaagcttgtgaaaggtgagagatccggccttgcacagctcgccgccgatttgttataaaacttcgatttctgtgacgcccgttatcggtttttcaaagtctccgtccacgtaaaaatggaccgggccgccgtcttgaaggggtttccctgcatcgctgaaatgcgcgattgcgtccatcgccttttctagcggcacttcggttctttctgattttgaaataaatgcgcacaagacagcgctttctttcggctcggcatttgctaaaacagcgccgagcttcatggcgaagctgccgttcatcagtctttctttttcataacgtttttcgctttttaaagtcggcggcgaaatgcgcccttctctgatcactcgttccggatcaagcgtatgctcctgggtttctgcagagccgtccggatgaacgggctgatttttttcaaacggaaacttgcggtcatcgaaaatccagacactcggatcaattgtaatcggatatgtaacattgccttttacctgaataacgctcatggtgaagcccccctttacttaaagtataaaagttttcgcatgaattgtcactttgcgtcgcaaattagatgtatacaacggcagcgaagtgaggatgatcgacatggtatgccggcattaccaagagctggacgcattagttcaggaagcgaaaaaaagaaccgaagaaggcaaagtggcagactatattccggctctggctgaatctgaacaagacagcctttcggtcacgatttatcatgcggaaaatacatgtctgacggcaggagacgccgaccggacatttacgctgcagagcatttcgaaagtgctttctctggcgctcgtactgatggattacggaaaggaaaaggtgttcagctgcgtgggtcaggagccgaccggcgacccgtttaattccatgattaagcttgaaacagtgaatccgggcaagcctttaaatccgatgattaatgcgggagctctcatcgttacgggtttcattaaagggcattcgccgaaagaccgcctggattacctgctcggattcatcagaagacttgcgaataatcaggacattacatattgcagacatgtcgcggaatcggaattcagttcatccatgattaatcgggccatgtgttattacatgaagcagtatgacatttttaaaggcgatgttgaagaggtcatggatttgtatacaaaacagtgcgcgattaagatgagcagtctggatttagccaaaatcggctgtgtattcgcccttgacggcaagcatccggaaaccggggagcaggtcattaaaaaagatgtggcgagaatctgcaagacgtttatggtgacatgcggcatgtacaatgcgagcggtgaattcgcaatcaaggtcggcattcccgctaaaagcggcgtttcgggagggatcatgggcatttcgccgtacaacttcggaatcggtatattcggcccggcgcttgatgaaaaaggcaacagcatcgcgggtgtgaagcttttggaaatcatgtctgagaaatacaggctgagtattttttgaaacattttttatcataacatctgcttaaatcctcttgcaatttcatctgataccctttatgataaatagaagaattaggtactcgcctggggaacggagggatacttttggcttcagagattatagttgaccatcagcagaaagcattcgagctgttgaagttagatgctgagaagattttgaagctgatccgagtacaaatggataacttaacgatgcctcaatgtcctctgtatgaagaggtcttggatactcagatgttcggactgtcgagggaaatcgattttgctgtccgcctgggattagttgacgaaaatgacggcaaagagctgctggacagacttgaaagagaactgtctgctttgcatgacgcgtttacaggaaaataaatgatcaaactcaaactatttaacggtttgggtttttttataaccgtaaaccgttttttttgcatcttcttttcgtaagacggtctcttaatctgcatttcatccgaaaaactataaagaaactgcgtaaaatgtttatgaattatagtaaaatataatacgcaataggtattaaacgtaagctttaagcaggaaagaggatgttatgtttaaaagaatgttaaaatcttacgattattcattgatatgcgctatcattctgctgtgcagtttcggattggtaatggtatacagctcaagcatgattaccgccgttatgcgttacggcgtgagcagcgactatttctttaaacggcagctgttcgccgtcatcgcggggtttgtgctgtttatcatcgcggccgtttttccgtacaaagtgttcgcccatcaaaagattcagaaattcatactgcttgcgtcagtggctgcgctttgcgcgctgtttgttttcggacatgttgccggaaacgcgcaaagctggtttaaaatcggcggaatggccattcagccgggggaatttgtcaagctgaccctgatactgtaccttgccgcggtatacgcaaagaaacaaagctacatcgatcagcttttgacgggggttgctccgccggtgatcgtcaccgtagttatttgtgcgcttatcgccattcagcccgacttcggaacggcgatgattatcggtctgatcgcgttttgcgtcattatgtgttcgggattcagcggaaggaccctgctcaggctggtgctcatggcgggaatcgtattgctccttgtcagcccgatcatctatctgaaatgggacgatattttgacacccgggcgtatgagccggtttgaaagccttgaaaatccatttaaatacgccagcacatcaggcctgcagattataaattcgtattatgcgatcggctcaggcggttttttcggtctcggtcttggagaaggcattcaaaaatacggttatctgcctgaatcgcatacagactttattatggcggttatttcagaggagctcggcattttcggcgtcctgtttgtcattgtgctgctggcttttgtcgtgttaaaaggtttttatattgcgagaaaatgtgaagatccgttcgggagccttttggcaatcgggatatccagcatgattgcgatacagacctttatcaatctcggcggtgtcagcggtttaattccgatcacaggtgttccgctgccgtttatcagctacgggggctcatcaatgtttttgttattaacgagcgccggtatattggtgaatgtcagcatgcatgtcaagtactcagaaaagaagaaaaagagggagcccgttccgtctaagggggtaaaaagacggcagacggaaaaatctgtgtatctctaaaaaacaagtgtatacacagggaggatattcctttattataaactacatatttattaggccaagggggagaaaagtttgtcacaacaatccatccaaaaagtgttagtagcaaacaggggagaaattgcgatccggattttccgggcgtgcacagaattgaacatcagaacggtagccgtttattcaaaagaagattcgggctcctatcatcgctataaagcggatgaagcttatctagtgggagaaggcaaaaaaccgattgacgcgtatcttgatattgaagggattattgagatcgcaaaaagaaacggcgtagatgccattcatccgggctacggatttctctctgaaaatatccgatttgcgagacgctgtgaagaagagggcatcgtatttatcggaccgacgtcagcgcatttggatatgttcggagataaggtaaaggcgagggagcaggcagaaaaagccggcatccccgttattccggggagtgacggaccggctgaaacattaaaagatgtcgaacaattcgcaaaagtccacggatttccgtttattattaaagcatcgctcggaggcggaggccgcggaatgagaatcgtccgaaacgaaagcgaattgaaagaatcgtttgagcgggccaaatcagaagcgaaagccgcattcggaaacgatgaagtgtatgttgaaaaactgatcgaaaatcctaagcatattgaagttcaggtgatcggagataaagaaggcaatgtcgtccatctgtatgagcgggactgttccgttcagagacgccatcaaaaggtcattgaggtggcgcctagtgtatctttgcagcctgaattaagggacgaaatctgtgaagcggctgtggcgcttgcgaaaaatgtcggctatatcaacgcagggaccgtggagtttctcgtagcgggcggtgaattttactttattgaagtgaacccgcgcgtgcaagtggagcatacgattacggaaatgataacgggggttgatatcgttcagacgcaaatcctcgtcgcgcagggccacggactgcacagccgtgccgtcaatatccctgagcagaaagacatttttacaaacgggtatgcgatacaatcacgtgtgaccactgaagatccgctgaatgactttatgcctgacacgggtaaaattatggcttaccgctcaggcggcggcttcggcgtccgccttgatacgggaaacagcttccagggcgccgtcatcacgccttattatgattcactgcttgtcaagctgtcgacatgggcgctgacgtttgaacaggcatcagcgaaaatggtccgcaacctgcaggaattcaggatcaggggcattaagaccaatattccgtttcttgaaaacgtggcaaagcatgaaaaattcctgacgggccaatatgacacatcgtttatcgacacaacgcctgagctgtttgttttcccaaaacagaaggaccgcggaacaaaaatgctttcctatatcggcaatgtcacggtgaacggttttccgggaatcgggaaaaaagaaaaacctgcatttgataagcctcagaccgttacgttaggtatcggggaaaagccggcaagcggtacgaaacagatccttgatgaaagaggcgctgaggggcttgctgactgggtgaaagagcaaaaatccgtgctcctgaccgatacaacgttcagggatgcccatcagtccctgcttgcaacccggatcagatccaatgatttgaaaaaaatcgcgaatcctacggctgccctgtggcctgaactgttcagccttgaaatgtggggaggcgcgacatttgatgtagcgtaccgtttcttaaaagaagacccttggaaacgccttgaagaacttcgcaaggaagtgccgaacacattgttccagatgctgcttcgttcatcaaatgccgtcggttatacaaactatccggacaatgtcatccaaaaatttgtccggcagtcagcggagtcaggtattgacgtattccggatctttgacagcctgaactgggtaaaagggatgacgctggccatcgatgccgtccgtgaaaccggaaaagtggcggaggctgcgatttgttacacgggagatattcttgataagactcggacgaaatatgatttgaagtattatctttctatggcgaaagagcttgaggcgtctggtgcccacattctcggtattaaagacatggccggtcttttgaaacctcaagccgcatatgaacttgtctcagcgctgaaggaaacgattgatattcccgttcatcttcacacgcatgatacgagcggcaatggcgtctttctctatgccaaagctgttgaagcgggtgtggacatcgtggatgtcgccgtcagctcaatggcgggtctgacttcacagccgagcgcaagcggattttatcatgcccttgaaggaaacagccgccgtcctgaaatggatgtccggcaggtggaaagactgtcgcaatactgggaatccgtccgtcagtattacagtgaatttgaaagcgggatgaagtctccgcatactgagatttataatcatgaaatgccgggcggccagtatagcaatctgcagcagcaggcaaaaggagtcggcctcggtgatcgctggaatgaggtgaaagacatgtacagcgtcgtcaaccgcatgttcggcgacgtcgtgaaagtaacaccttcttccaaagtcgtcggagatatggcgctttacatggtgcaaaacaatttaacagaacaagatgtttatgataaaggcgaaacgcttgattttccggattcagtcgttgagctctttaaagggcagatcggccagccgcacggcggatttccggaaaaactgcaaaagctcgttctgaaaggacagacgccgatcacggtaagaccgggtgagctgcttgaacctgtatcttttgaaggcattaaagaagaatggaaagaaacgcatcagatggaattgagtgatcaggacgcaatcgcgtatgctctttatccgaaggtgtttactgaatatgttaaaacggcggaacgcttcggtgatatttccgtattggacacaccgactttcttctacggcatgacactcggtgaagaaatcgaagtggaaatcgagcgcggaaaaacgctgattgtgaagcttgtatctatcggtgaaccgcagccagatgcgacacgtgtcgtttatttcgaattgaacggccagccgcgcgaggtggtcattaaagatgaaagcattaaatcgtccgtacaggaaaaattaaaagcagatcggacaaacccaagccacattgcggcatccatgccgggaaccgtcattaaattgttaacggaaaccggggcaaaggtgaataaaggcgatcatctgatgattaatgaagcgatgaaaatggagacgacggtacaggcgccgttctccgggacgatacagcagattcatgtgaaaaacggtgaaccgattcagacaggcgatttactgatcgaaattgaaaaagcgtaaaaaatgaacataaaaaaacctgatccgcccccgtgtgcgatcaggttttttatatgtaaaaaggccgaagctctaatgcttcggccttttcatgtgcctcagatgtaccgctgttttgattcatagcggaagcgggcgattaataataagaaatagcataagacgccgaacaggccggcaataaagagcgaatgggcaagtgcaaagccggtggccatttctgaataaacaaccatgattccggagagcgcctgtaatacaacaaaggcaagagccgctatccagcccccaagaatctgtttttggtctttgtaggagcgcaccgcatgtgcaaaagcgacaagaatccatacgaacagaagcagcgctgccgttctgtggcccatctgcacccattcctgaaaatgggacggaagcccgtgattcagcctgctgcaaagcggaacgtcagggcaggcaaggcttgatttcgtatggcgcacataagctcccgtataaacgacgatatacgtgtaaatcgaaaggccgatcatatgaaactgcattttcctgccgattctgagcggcttgacgagctttttgtctgatttatcagcttcgaatatgagcagcgtcaaaatcagaacagaagcgaaagaaatcagcgatatgccgaaatgaagcgccataacgagcgcatttgatccgaaaacaaccgctaatgcgccgagaagcgcctgtaaaaataaaaagataatggacataatggcgagaaaggttgtttcacggaaaacaggcgtgacttttctccatgcccaaaaagcgagactcagcacgagaacgattgagacaccgcttgcgagtctgtggctccattcaatgatagaagcggcgttaagctccgggaaaaaccggccgtggcaaagcggccactgccttccgcatccgagacccgatcctgtctttgtgacaagagcgccgccgatcagcacgacgagcataacgaatgtcgtcagcacgccgagcgctttcaaagctttattcattttacattcaccttcttaacaaactggacaaaatgatatacgtaccaagtgtaagcgaatatgtgttttgtggcaattctcaattctgtttgttcacaaaaatataatagaatcaggacttcttagataatggggttgattattccagatgggtctgatagaaataaagtaaccgctttattatgaaaccggcggatttggtaaaattcataaaaagttcacaaataaattcctgtttctcgtttaatatttaagaggatgtttttttacaggtcattatcttgtatgatagagttgcaggtcttaaaaaacctgctttaggtttgtaagggaggtttacgttatggctaattccagaattttaaacgatacagctatagacggacagattgaagagacgacggcatggaaggatttcctttcgcttatcaaaataggaatcgtcaattcgaatttaattacgacttttaccggcatgtggcttgcgttacatatatccggtctgagttttttaggcaatttaaacaccgtgcttcttacattaataggatcttctttgatcatcgccggttcttgtgcggttaacaactattacgaccgtgatattgatcatttaatggaacgcacgaaagtaagaccgacggtaaccggaaagattcagccgaatcaagcgctgtggtcaggaattttactcattgctttaggacttatcatgcttttgatgaccaccgtgatggcagcagtcatcggttttatcggcgtgtttacgtacgttgttctttatacaatgtggacgaaacgccgttatacgattaatacggttgtcggaagtgtatcaggcgccgtgccgccgttaatcggctggacagcggttgaagggcacatcggtgttgtcgcgtgggttttattcatgattttattcatctggcagattccgcactttttagcgcttgcgattaagaagacggaagattacagagcagcgaatattccgatgcttccggtagtgcacggctttgaagtgacgaaaagacagattatcgtctgggtcgcatgcctgctgccgcttccgtttttcctcggcagtctcggtcttccgatcgtcattctcggcactttgctgaatgtcggatggcttgttctcggactgatgggattccgcatgaaaaacatcatgaagtgggcaactcttatgtttgtctattcgcttaattacatgaccatttattttgtagcgatggtggtctttacgctgttttaattgaataatgagcttgtttgatcaccaaaacaaacaatgacaactagtaaacgccgccttgaccttttgtttaatcaggcggctttgcttttatacatagatggaattttaagtaaaaaatctcatattttaagaaatgaggaaaagaagtatttcagctggaagcagatttactgcttgtgcatctcgtactgattcaaaaaaggggttgggtgaaatgttaaagcgttggcgtcttttatcattattagccttagtgccgcttttattgagcggctgtggaaaaccgtttctgtccacactcaagcctgccggcgaagtggctgataaacaatatgatctgacggtgctcagcacacttatcatggttgtcgtcgttgcggtcgtagcagttattttcttttacgtcattgtgagattcagacggtcgcgtataggggaagacacgataccgaaacaggtggaggggaaccgttttttagaaatcacctggaccgttattccgatcctgcttctgattattcttgtcattccggttgtcatcgatacattggcgctggcggatacgtcgccgatggataagaaaaaccgtaaagcagaggatgcgctcgtgattaatgtaagggcgaatttatactggtgggaattcgagtatcctgattacgggtttgtgacaagtcaggagctgatcgttcccacagatgaacgcgtctatttcaagctgaagtcctcagatgtgaaacactctttctggattccgtcagccgggggaaaaatcgatacgaatacggataatgacaatactttctttctgaccttcgattctaaacgcagcaaagaagcgggagaatatttcttcgggaaatgcgcagagctgtgcggaccttcacatgcgctgatggatttcaaagtgaaaccgctgccgtcaaaagaatttaaacaatggacgaaagcgatgaaaaattataagcatacaacagattccggtttagccgcgcaaggagaagagctgtttaaggaaaaaaactgcctgagctgtcatgcggttgagcccaatgataaacgggctgaagcggcaagaacggctccgaacctcgctaccttcggtgaacgggtcaaagtggccggcattaaggatgcgaataaagagaatataaaagcctggctgaaaaatccggacagcattaaaccgggcaataaaatgacaggcacttatccgaagctctcggacgctgaaacggatgcgctgtatgaatatttaaaagggctaaaagcggagaacaagtgaggacagggagatatcaggggggaggtcgtaaatgatgaatacgcttacaggacagcgaagaaaaagctctttgctttgggattatttgacgacggttgaccataagaaaatcgcgattttatatatgatcgccgggggatttttcttcgtcgtcggcggacttgaggccatgcttatcaggattcagctcttgaggccggggaacgattttatgggtgctcagcagtttaatgaaattatgacgatgcacggcacgacaatgatcttcctggcggcgatgccgctgttattcgggctgatgaacgcggttgtgccgcttcagatcggggcgcgtgacgtatcgttcccatttctgaatgcgctaggattttggctgtttttcttcggaggcatctttttgaatctgagctggtttttaggaggcgctcctgatgcaggctggacgtcgtacgcgtcgcttgcgctgaattcgaaagggcacggcatagactttttcgtgctcggcctgcaaatatcaggcttaggtacgctcattgcggggatcaactttctcgccacgattattaatatgagggcgccgggtttgacgtatatgagactgccgctgtttacgtggacgacatttgtggcgtcggcactcattttattcgcatttcctccgctcaccgtcggtttggcgctgatgatgctggatcgtttgttcggaacgaatttctttaatcctgaattgggcggcaatacgataatctgggagcatctgttttggattttcgggcatccggaagtatacattttaatccttccagcctttgggattttttcagaaatcattcccgtatttgcgaggaaacgtctgttcggttattcgtctatggtcttcgcgatcgtgctgatcggctttctcgggttcatggtttgggttcaccatatgtttacgacgggactcggaccgatcgctaatgcaatatttgcggttgcgacgatggcgatcgcggtgcctacgggcattaaaattttcaactggcttttgaccatctggggaggaaatgtcaaattcacgacgcctatgctgtatgccgtcgcctttattccttctttcgtactcggaggagtcacgggtgtcatgctggcggccgcagcggcagattatcagttccacgatacgtattttgtcgtagcgcatttccactatgtcattatcggcggcgttgtgttcggcatcctggcgggggtgcatttctggtggccgaaaatgttcgggaaggtgcttcatgaaacgatggggaaaatttcgttcgtcttattttttatcgggtttcatcttaccttcttcattcagcatttcctcggtttgatgggaatgccgcggcgcgtttacacatatctgcccggccaggggcttgataccggcaacctgatcagttcaatcggcgcgtttttcatggcgggcgcggctgctttactcgtcgtcaatattatttatacctcaataaaggggaaatacgtcgggaacgacccgtggctggacggtcgtacgcttgaatgggcggtctcttcgccgccgccggaatataattttaaacagcttccgtttgtccggggacttgacccgctgtggattgaaaagcaggccggaaatgaagggatggcgcctgcagagcctgtagaggacattcatatgccgaacggctccatcatgccgtttatcatatctttcgggctgtttgtcgcagcgttcgggtttttataccactccgattattcatgggggcttccggttatcttcatagggctcggcatcacattctttaccatgctgcttcgctctgtggtcgatgattacggctatcatattcacaaagaagatctgccgaatgatgataaaggggtgaaggcgtaatgcagctgcaggaaaaaatgacggctgaaacctttccggcttctcctgaaaaagcaacgctggaggggaaaaataagtttttgggattttggctgtttctcggcggggaaacggttctgttcgcctcgctatttgcgacattccttgctttacgggaatctaaagccggagggccgtcaacggctgagatgtttgagctgccgatcgtatttatcgcgacgatgcttcttttaacgagcagcttaacgagtgtgtatgcgatgtatcatatgaaaaatttctcctttaaaaaaatgcaggtgtggcttttggttaccgttttattgggagcaggatttttaggggtagaaatctatgaatttatgcattacactcacgaattcggctttaccattacaagctctgcgctcggctcagcgttttacacgctcgtcggcacacacggagcacacgtggcgtttgggctgttgtggatcagcgcgcttatgatccggaatgcgaaaagagggctcagcctttataacgcgccgaaatattatgtggccagcttatattggcattttatcgatgtcgtgtgggtctttatctttaccgttgtatatttgatggggatggtgggataacgatggacgataacaaaaacagagggactgtcagtacggatctcgaatatcggaaaaagaaaaatgccgaggagatgaaatatcaggtcatatccttcggtttgatgatcggccttacgcttgtcgcgtttttgacggtggctgctgacggcattgccggatggtttacgatgccgtttctgatcctgcttgcggtcatccaggtcatctttcagctgttttactttatgcatatgagccagaaggggcatgaagcgccgtcattatttctgtattcgggaatatttgtcgcgtttatcaccgtgcttgcatttgtcacgattatttggtggtaatcgggacggcggggagtgagagatttgattaatttggaaatgttcgggtttcgcgcaatgtggagcccgtatctgttttgtataactgccgtgataacaggtgtttacttttactggtgcagccggcataaaggacgtgtgtccgctaaggagaaggtgctgtttgtgctttccgtgctatttttttacgcggctgcgggaagtccggttgatttattgggccatgtgatgttcagcgcccatatggcgcagatggcggttctgtttttagtcgtaccgccgctgttgatttccggaattcccggctgggcatggaaaaaactgatcttccgtcctgtcgtaaagccgctgttttcgttcttttcaatgccgcttatcgcattagtgctgtttaacggtattttttcactgtatcacattccgtttatatttgatttcgtcaaaacggattcgctgtatcacacgctgatgaacggactcatctttgtaacggcgttttttatgtggtggccgcttgtgcataaggtggacggtctgccccgtctcagcggtttaatgaagctggggtatattatggcagacgggattctgttaacgccggcctgcgcgctcattatgttcagcggggcgcccatgtatgccacatatacagatccggcggcttgggccgaagcaatgaagctttgcgttcctttagatttgctggaggagatccctttatccgggccggagatgttcaatacgctccctcctctggaagatcagcagcttggggcagtactgatgaaaatcattcaagaggcggtctacggaacatatttggctgtcatcttttttcagtgggtcagaacggaacgggaaaaagatacgctgtcagagccgccgtatatcgagcataccgtctcataaaaaaagtacagcagaatagggactgccccccgtttttgagacaggggtcaaaacaccttttaaacagccaattgccgatagtttatcggtgattggttgtttagtttggtttgaatacgaatattgttataataatgaatgtattctatgacagtgcgttctacgatggcagtcgtagttcgatcaatgctgttaagatagaacgtttcagactttagcgaggaatgaaacgattcgatggaggcattatcagcgggcgtccctttgcgggacatgctcatggtaatgccttttgttttaacagctttttgata

SEQ ID NO: 4 - DNA, 460899 bp, Bacillus methylotrophicus
ccttttccgtaagtgtattgctttccaacaggctgttcgaatcgatgtgtatcaccagccttataccatctaacccatgtctgaacctgtgtcttattcttaatattcaactcctgcaggatctctttcataggtacgcctgccaatctcatttctacagccttctgtttcacttcaaccggataactcactcttgtccccatagaaaaaacacctccaagtctaatttcggataacaatcatccgtattcaaacttgaaggtgtttttatttgtctcatcttatggggtcagtcccgaatatgctgtacttttttattacatttgcactgtttttaatgactcttccaattcaagcagtaaagctttgctttcagcgacgacatgttccggaaattcttcagcgctgccgtattctacgccgtgcggataataatgctttcctaaaagaggggccttcagctgaatcacggcccggctgccgccgacatcgccctcttttgccgttccttgaatccgcagataaaatgtcccctcaggtactgaaaactttttgtcgtaagtcactctttcataatcccattgtccagccagaatgagccctttaccttccatcagatcattcaagcggctgagctccgctgttaccccttcaagaccgctgttttcaaacttcaaaccttccccctccttttaaaaatgccctttcctgacaatcatagtatgaaagcgttacactttcaatgattcatacggtgaaagtatgcaaaaagaaaaatttgacgacaatagtagcagaaaaaaggaggaattccgcaatgacaaagatcaataagctcatgacgtcagacttgcaatattgtacagtattagataatgtatatgaagctgcggtgaagatgaaagacgcagatgtcggcgccattccgatagtggatgaagacggcgccacacttgtcgggatcgtgacagacagagatctcgtattacggggaattgcttcaaaaaagccgaactctcaaaaaataaccgacgcaatgacagagtgggttatcagtgcagaggaagacgcctctgtggaggaggtgctccatttgatggctgaacatcagctcagaagaattcccgtcacaagggataaaaaactggtcggcattgttacgctcggcgatctttcgttggccgagcaatcaaatgagcaagcaggccgagtgctgtctgacatttctgaagacggcggtccggaggggtttatccattaaacataaactcacggacgatgcaaataggctgtactgtataagagtaaacaaaaacagaacggtttgaacatatgggggtgagaggttgaaaaatatcgcaagggctctcgttatccttttgcttatttacggagcgtatgttctgtttatacaatatggatcggctcctcagaaaaagacggatcaggaggagcctcaggtttccaatgaagaagagagcggaaaacggctgaaaatgccgtcatccggactgctttctctcatggggaaatctgccgccgatgtgaaaaagaaacttggggaaccgtcccggaaagatccttctgcctacgattacgagtggtgggtgtacaaccaggggaaagaccaatacgtacaagtcggtattttgaatgataaagccgtgactttatacgcttcgggaagcggcatcaacgcaaaaccgtttaagatcggcgaatcgacgggcgaagtttttaaaacgacgcaggtttctccttttgtcaatgtgactgacaagggaaacacgtatcggttcgagttttccgaggaagatatcaatacccgtcccaccgtcaagataggcggaatgtatgttcagctgtacatggacaaatttgacgggaatctgtcaagcatcagggcatttgatgcggaaacacttgtgaaacaaaggccgtatgaagtcatgtacagaggaaagctgacagaacccgagcctgtttctgataaaaaatggaacgacattgaacgagcgagtgaacagcagattctcgatattacaaatgtcatccgcgtgaaacacggacttgcaaggctgaaatgggacgaaggcgccgcaaaagtggcattcggccacagcaaggacatgaaggataacaagtatttctctcacgtctcaaagaaatacgggactctgaaggaccgcttggaaaaaggcgatgtgaaataccgggaggccggtgaaaatattgcctacaactatgtggacggtcctgcagccgttgagggctggctgaacagcgaaggccacagaaaggcgctgttaagcccggattatacgcacctcggtgtcggcgttgatcagaagtattatacgcaaaacttcattaagccttggcagtaaaaaaccgcagaggagcgcgtcccccgcggtttttttatgttttttcgcgagcggtgctcctggcgaaaaaaacaatttttatatatacctgctttttttcgcaatttaggcgaacattaaggcgcatgaaccgatacattatagcaggcaaaacttttcggagggggtgagaattgtggcgaatcagcaatcacggcaatcaatcgatgattttaaacaattcgtaaaaaagcatcccaaactgatccaaaatgttcgcaaggaacaaagaagctggcaggaagtctatgaaaattgggttcttctgggcgaggatgatccgatatgggacccttttaaagacgaggccgttcagccttcttccgacgcggaaaccaaacaggaaccagctgaaaaaaacgatttcgtttcaaaaatggtcactgccgtcaaaaagatggatatcaaccaaatgaatgagcagatcaataaaatgagccaatccatttcatcattgcaaagccttttaagccaattttcggggagcagcacgaagcagccccggcaaggctccggacaacatcctttttcgttcagaaaggattaaagaaggggatcgtgtatgcgaaaagaggttcaggaattcatatccgcagatgaggaacggaaacggtttatacggcagcgtcccgtctggtaccgcagacttgcgagaaaaccggacgatctcaattcctttcagcttgacatgatgaatttttatgaaaagacgataccgcatcgggtaagccaattctcaaacgggattcaaatggcgcagatgatgatgcagatggttcacgccatgcgttcacaggattaaaaagcgtttaaacgccgcattttccaattgggtggtttcatggtaaactagcaactggaggtgcgtatttatgtatgcaacaattgagtccgtcaagcttcaaagtgaagcggagcagcttgccggcatgattctgcagtctgagacggctgaaaattaccgcgattgttacaagcgtctccgtgaagatgaagaggcagggcggatcattcgttcttttatgagcgttaaagagcagtatgaggatgtgcagcgctttggcaaataccatcctgattatagagagatttcccgcaaaatgagagaaatgaagcgggaactggatttaaacgataaggtggccgaatttaaaaaagcggagactgagcttcagtcgctgcttgacgagatcagcattgaactcggaacggccgtctcggagcatgtaaaagtgccgacggggaatccttattttgacggcctgtcatcctgcggcggcgggtgcggttccggcggcggctgcggatgcaaagtttcctgacgagacggccgtctcgtcttttacataaaatgaacagaaagtcaggcgggtgatcatgatggaaaataagcgccaaggcattatcgtatatctgcattccttgaaacacagcaaaatgctgagaaaattcggcaacgttcattatgtttccaagcggctgaaatacgttgtgctgtattgcgatatggacctaatcgaaaaaacaatggaaaagatttcttcttattcttatgtaaagaaggtagagccttcttataaaccttttttaaagctggaatttgaatcaaagcttgataaggcgaaagagtacgattataaagtcggtatataaaaaaatccccgcagatacctgcggggtccttctattccttaacgagttaaggagaaggaaaagggagaggagaaaccggaggaagaacttatggggaaacgtaagtcttctccgcggttggcaacaacatcattcattgatgctgttacacgtagtcttgacaggaatgtgaatatgtatacacgtttttcacgttcattgtttgaaagaatgctttatgataagatagggattgttttgatacataacggctcagccgatgagaaacatcaaagttttcagaaaaagtggtgtgaataatgagagtaatttccggttcaagaaaaggacgagccttaaaggctgtgccgggcacatcaacaaggccgacgacggataaagtaaaagagtctatttttaatatgatcggcccgtattttgacggaggaacggggcttgatttgtttgcggggagcggcggtctcgggattgaagcgctgtcgcgcggatttgaccgctgtatctttgtggatcgtgatttcaaagccatccaaacggtaaaagcgaatatcaaagcgcttgatctgctgtcttcagcggaagtataccgcaatgatgcagagcgggccctctatgccgcggcgaaacgggaaaaaggttttgacggaattttcttagatcctccgtataaggaacaaaagctgaaagcgcttatcgaaatgattgatgagcagaacatgctgaatgaagacggttttgtcgtagccgagcatgataaagctgttgcgcttcctgaagccgtcggcgcgctttctgtaacaagaagggaaatttacgggcttacaggagtgacgatataccgaaatagggggtaatgatgtggcaagtatagctgtatgtcccggaagttttgatcccgtcacctacggacatctggacattatcagacggggggcaaacgtgtttgagcaggtgtacgtatgcgtgctcaataattcttctaagcagccgctgtttacagtagaggaacgatgtgagctgttaagagaagtgacaaaagacataccgaatgttacggtcgagacgtcacagggactgttaatcgactatgcgaaaaaaaagcgggcgaaggcgattatcagggggctcagagccgtttctgacttcgaatatgagatgcaggggacttccgtcaaccgcgtgctcgacgaatcaatagaaactttttttatgatgacgaacaatcagtactcttttttaagttcaagcatcgtaaaagaagtcgcaaaatataacgggcctgtttcagagtttgttcctccggaagttgaacaggcgctgatgcagaaatttaaaggatgagaagcgctgattggcgtctcatcctttttttgtccgtgctgacagcctgtaacaataaatcaatgcgtatatggcgagagctgtcagcgtgatggcgggcccgatttcaacaagtgtattccagccgctgacggcagcagatcccgcttcctgatcgcggaaagggaggaatacggactggtaaggttcgtccaatgcaaggtaaagcggcttccacagtaagagaataaagagtgcggcataaatgccctgaaggatacgcgccgcgaaaaacggtttaaagcggatatctgtttccgataaaatgccggctacctgggcctgtacggaaaggccgctgaacccgagaataaaactcacaatcatggctttcggcagcaaggcggcatcagcttcactgaccagcttgctcccaagtgtaatttcaaacattccgctgataagagggatgtccagatttgccggaagatgaaaaagcgaaagcagcgcgtttgtaaatacagaaagcacatccatgacttgtacgattgataataaccggctgaaaaccgaaaacaatataataaaaccgcccaccatcagcaaggtttgtacagaagaggtgacggcgtcgcccaaaatttttccgagcggccgcttttccgaaagccgcgccttgtggagggccagaaatgcttccttcagagaagggagagcgatcgtctttttaccggtatacgccgcttcttctttccgtccgtatgaacgcatcgtcaggccgacggcgatgtttccgagatagtgagccgatgccagcagaatgccgagagacgcgttatgaaaaaagccgactgccacagcagcgaatataaataacggattggatgaattggtaaaagagacgaggcgttcagcctctactctggagatttgtttatcctggcgcagccgtgcagtcagcttcgcgccggccggattgcctgaagccatgcccatagccagtacaaatccgccgacccccggcactctgaaaatgggacgcataaagggttcgagtaaaaggccgacaaacttgacaatgccgaatccgattaaaagctcagatagaataaaaaacggaagcaatgaaggaaaaactacctcccaccacatggaaagaccggttttggaggcttcgaatgaggcctgagggtgtgaaataaccgtagccgtcaaaaaaatgaaaaacaatgaaatcaaaaatgtatgaaacttagacaaattcattcttacctccccgatgctaaaattgcacactgacatttatatcatgataaaatatagaacagaccttaaaggcggccgggcaagtacctatttgtcatcctgtactaatatacgagcataggggttcaatttagaccatagaattcatgtataggatgtctattagggggttcgtcgcgttggccaaacctacaatcgggttagcgttaggttcgggaggggcaagaggcatcgctcatctcggagtgttatccagtttacataagcatcagattccaattgatatgattgccggcagcagcatgggagcattagtcggaagcttttatgcggccgggcatgacgtggccacgatgaaaaaagtcgctaaagcatttaagcggcggctgtacgcggattatacgatgccgaagctcggatttttaaaaggagaccgcatcaggcagctcgttcatgcctatacgtacggcaagccgatagaagaactgcggatcccgctcggcatcgtggcctgcgaccttcagaccggcgaaaaactcgtttttacgaaaggttcagtgtccgaagccgtccgcgcgagcatcagcataccgggcgttttcgtcccgcaaaaaatgaacggacgtatgttagtcgacggcgcggtggtcgacagaatcccggtttccgccgtaaaagatatgggtgctgatatcgtcatcgcctctgacgtatcccgggtgaaaaaaacggaaaaggcggcacatatttttgatgtaatcatgcaaagtatggatatactgcaaaatgaattggtccgtcaccagaccattgccgcagacgtcatgatccgcccttctcttgaatcattcagctcaagttcttttgccaacattgatcatatgatcacagcgggcgaagaagccgcagaccggatgatcggccggattaaacaagaaatagagaactgggagggctaactcatatgaaagcaaaacattttcgctgggtgtttatcatcctgatcttattaatcgctgttacatttattaagcttccgtattacatcacacagccgggagaagcatcagagctgagaccgctgattaaggtggacggaggctatcctgaaaaaggaagcctttccttgatgactgtcaaagtaggccccgccaatccgtatacatatctttgggcgaaagtgcatccttacgaagaaatcgtccctgatgaaagcataaaagaagagggcgaatcggactcggattatatgaagcgccagctgcaaatgatgaaaagctcccaagaaaacgcggtcattgccgcttatcaaaaagccgggaaacaggtgaaatactcatttaacggcatttatgccagttcagttgtctctgacatgccggcaaaaggaaaaatagaggtcggtgataaaatcatcagcgcggacgggaaaacatacgaatccgctgaaaagctgattgattatatcagcagcaaaaaagcgggggaaaaagtaacgtttcacattgaacgggacacgaaagaaaagaccgttgacattgtgctgaaatcattcccggacgacccgaaaagagcgggaatcggtgtcgcattatatacggaccggaacgtgaaagtgaagccggatcttcatttcagcattgaaaacatcggcgggccttctgcgggtctcatgatgtctttagaaatttacaaccagctgacaaaacctgacgaaacaaaaggctataatatagccggaacgggaacaatcgacgtggacggcaaggtcggaccgatcggcggaatcgatcagaaagtcgtcgccgcagacaaagcgggaaaagatattttctttgcgccgaatcaaaacggagctgaaaattctgattacaaaaatgcggtaaaaacggcgaaagcgatcaagtccgatatgaagatcgtccctgtcgacaccatgcaggacgcacttgactatttggatcagctgaaagtaaaaagcacctgatacagacaggtgctttttttacgcattcaaaaaacacttttcgtcttcatcatagcggatcggcgcttgtgaaaattcctgtttctcaaacaatgtgcgttcaggttcgtttatcggcaggctgtaaacccgtcccgccagtatgtccagatccagagcgggatgagagaaagaagagagcttgctgacgagaggtgcggtaagctcttttttctttgccgacaggtacgcctgtccttttttcgtcattccgagaagacggatataaggagcgcttgaaggctgcaagagccgatgcatgtcttcttttttcgtccgtgtcagaatgtgcgtgttcatccgctgcagcctcgtccacgtgtatcgttttgttttcaatcgttccatcatttcgcgataggatcgggcttgtctgatggtgcgcagaattctgtgctcaaggccttcttccacttcatagattcggctcaattcttcagcggaaagagtgctgaggctgtattttacatatgaaaaatagtcttccgtgctgtgccatatgccgtatgaatttctgtatgcctccagctcacgcgcagacgcttccgggagaaagctccttacggccgccgttcctttttctatcagtgctttccggatgcttgttgcgctggctatccggctgttatctccgggaagctcggcgtcatgatattgggaagcgattctggctgtcgtataaggcttcatagcggaaccggaggtgtgtatcgctctaacgtagtgaaaaccgagaatattgttcggcttggacaaatcgagcatgtcccgccctttgaatatgtgtgaaagagcttttgaggcggcggccggatagctgagaccctttttcagctcctctttcagaatcaggctgcagtcatcttcctttcggctgaacgcttcagacgcttcaataaagggttcgatccgcccgttttcgctgccgaaaaacaagctgctgcatcctaaatgatgaagaagcgaaacgctgccgcgcgcgaataattccgctttttgtacggcatatatataagggagctcaatgacgatatccatgccgttttccagcgccatttttgtccgggcccactttgagacggcggccggttccccgcgctgcaaaaaagggccgctcatcaccgccgccgcgacgctgctgtccgttttgatttttgcttgttccgcatgatagcggtgtccgttatgaaagggattatattcaacaaccaggccgactgctttcatatttgtcccgcctttcttgctatgttttgcttcgtgtggtacatttgcaaatgaagtgcatattttagtccgtttcgtttagtgtatgcatagcctatccggctgtcaacgattgcatgacggcggcattatgctgtaaagaaaaaatattgacaaaaacattctgaaaagctataatcatgtttgttgctttcctgaggtgatacaaatgaaatggacgatttatcagcttcatcaaatggcgaaaaagagctttgaatttgatgaaacagttgagttaaatgagctgacaaaattgaattctgacatccgccgcatttctcccgtccgggtgaagggccgcacggagattgaatccaagcaagtttcgtttgactttacgatttcaggcgaaatggttttgccgtgctcaagaactttagttgatgtgccgtatccatttacaatcgcgacaaaagaactgtttagatttcataagtcggatgatatagaagatgaggacgttcattttgctgaagacgataccgtcgacttaactccgatcataaaagaagagattcttttagaaattcctatgcaagtcttttgtgaaactgaacaaaaagaaggagccgctccccaagtggggaaggattggcaagtgatttctgaggaagacaagaaaaatcaaatcgaccccagacttgcggatctgaaaaagctcttaacacaagatgatgaatcttaactctttaaggaggtgggaataatggctgtaccttttagaagaacttctaaaatgaaaaaaagattgcgccgtacacatttcaaactaaatgtacctggtatgacagaatgcccgtcatgcggagagatgaaattgtctcaccgtgtatgtaaagcatgcggatcatacaacggcaaagacataaatgttaaaagcaattaatgtatgaagaaaagcgcgggaatctcggttcctgcgcttttctttttttttgcccctccggcctgcttccgccgaaaaaattgtgagcgccagtagtctatctaatctatcagcggcatatgtatgaggtaaatgagcaaatatggagggagatacgattgacgataacgagacaggacgcgtggacgcaagatgaagatttgctgctggccgaagtggtgctcaggcatattcgggaaggcgggacccagctttccgcttttgaagaagtcggcagagcgctgacgagaacggctgccgcctgcgggttcagatggaattcttatgtcagaaaacaatatcagtcagggatagaactggcgaaaaaacagcggaaggaattaagaaagcagatcggggtgcattccgccaatctgccgggaaccgtcaaacagtctccgatccgcagggcggaaggagaaaaagagctgtccattgatgatgtcattttgtttctgcagcaatttaaagagtcgccagccgcagcggatgtgcgtcatgaaaaagaaaaactcacagaacagctgaccgcgctgcaaaaagaagtcgaggatctgcgtgaggaaaatgaaagcttgagaaacaagctggagatgacggaagaagattataaagcgttaattgacattatggacagagcgagaaggatggtcaattcaaaagaagacgacagaaaatcggcgcagagcctgtaaaatgaaccggcctgggggcggcgccccgccggttttttattatgccgtttctccggttgtcatttcaccgtccatatcgggatgccagatataaggattttctcctttatcacgcgccatatcatatttaacgggctcaaaattcatcttatcccagaaatctgctgatttcatgcgtgaatttgtcctgatcggcattctgaaggattttgcaaaatcaacaagcgcttttccgtatccgttgttttgatagcccggaagaacctcaagcttccaaagttccaaaaagtcctgacgctgatcaaaatacggatttgcgcctccgtttacctgatataaactcattctcgccactagtttatccccgaagtaaatcccgtaaaaaggcgaggtgctgtcattttcaatgatattatcctgaagatcttcaagcatcgacagctcctgcatcccgtattccttaaaccttttaaattcttcgagtgtcttaaagttgatgagcagtcgctctattttcaacacaaactccccctttgttgtgttctaccattattgtaaacgctttaattgaaaattccaactataatatgcttgccagtctttttgctcaaaacgaaattgaagtaatttgcggcggcttctgctatgataatatggaaaaatgcagatatagggtgtgacagtgtgaaaatcggaattatcggcggcggagcggtaggccttttatgtgcttactacttatcgtcccgccatcaggtaacggtcattacgcggcggacggagcaggctgatgcgattaactcaggcggtatacggcttttgaaagacggaatagaatgtacggcggcatgcagagcgcaaaccggcctcacttccggattcgacctcttaatcgcagccgttaaacagcaccagctaagtgctgtgttgcgggatcttgagacgataaaagggacgaatgtgctgtttttgcaaaacggcatgggacacatacacgacattaaagattggcatacggatcattcgctttatgtcggcactgttgagcacggagcaaaaaagatatcagatcatgccgttgaacatacgggagcgggagccgtaagatggagtgtattcagcgcatcccggccggaaacgctcaaaagcatcttttccggcatgcaccgggattttcccgtatatgatgaaaacgactggtatcggcttttaacgggaaaactgatcataaatgtatgcatcaacccgttaactgcattgctgcgcgtgaaaaacggagagctgttaagaaatgacgcttacaaaaaatatatgagaaacgtgtttgaagaagcggagacaatacttggcctcgccgatagagaaaaagcgtggaacaaggtttgcgaagtttgcagactgacggaaaaaaatcattcttccatgctcgtcgatatcatggcaggcaggcggacagaggccgatgcgattatcggctaccttgtaaaagaagcggaaagccgcggattgccggccgttcatctcccgtttttacaccgcagcataaaagcgttagaaagaaactgaaacaaagtcttttgaggttttccggtaacatgctatactcatttcggaaacctaactatttattggagaaaggaagttccagacagatgcagctaactgaactttccatcaaaagtcaaaataagtttgtgcagcactatatagatggagaaaacatgtcttcattttttgattatgatattcattcagaggacgtatggcaaaagcggcttcatgacctgtcttcgcggccgtttgccagagaagaattagcggattatttatcctcctatcacgaaaaatttcactccgccgccatgcaggcctccatcgaaaaactgagagatccaaaaagcgcagcggtagtaggcggccagcaggccggtcttttaacggggcctctttacaccatacataaaattatctccattatcgtacttgccagacagcaggaagaggcgttgcagattcctgtcgttccgattttctgggtggcgggtgaagatcacgatctggaagaaatcaattttgtgcacacgtcaacagagaataaaggtccggtgaaacagaaactgccgcagtcgtactggaaaaaaacatcggcggctaaaaccgagcttgatcaggaaaaatgcgcggcttggattgatgaagtgttcgctgcttttgaggagacggatcacacaaacgcactccttcaaaacgtgaagcgatgtttacgctcatcagagacattcacggacttttttgagctgttgatcgccgacttgtttcaagaagaaggccttattctgatgaattcgggagatccggggattaaaaagctggaaacgggtatgtttcagcagattttaaaacacaatcatgagcttgccaaagccgtgtcagaccagcagcgttttatgcgggaagccggttatcacccgattattgaatcggacaaagatcaggccaatctgttttacgaacatgagggagagcgtttcttaattgaaaaagaaaacggcgtttttgtcattaaggagcttgacctgaagtggacgaacgacgagcttcatacccatatggaagaaaaaccggaatgtttcagcaataacgttgtgacaaggccgctcatgcaggagtttctcatcccgactctggcgtttatcgcgggaccgggggagatcaattattggggtgagctgaagcgggctttctcattaatgggcttacgcatgacgccggtagtgccgagactgaacattacgattttagagcgccatattgaaaagaagctttcagaacggaatatcccgcttcaggaagcgatcgaacacggcaccggacacctgaaagacacttattttgaagagcagattccggaagagttttcttctgtaatggaacaggcgaagtcgcagattgaagctgtccataaacgcgcaagggacgaagcgctgaaggtcgattcaagccttgagccgctcttacagaagaatgccgccttcattcaagatcagctcttgtttttagaacggacggtaatgaaaagaattgaagaaaaagaaggctttgtgctgcgtgactatgaaagaatccaaaacagcatcagaccgctcggcgctccgcaggaacggatttggaatgtgatgtattatctgaaccgctacggtccaaaattcttcacaaccttcaaacatctgccattttcttttcaaaaccaacatcagattgtcaaactttgaaataaagttttaaagaaccctgaatagttcagggtttttttttatgtgtaaacagtgtaaaatgaggttgtggagagaagtggcggatagtggtgagtttaggggagaaagtgggggtccttatcatgtttatgggtgaataccggcatactgttgatgcaaagggccgcatgatcgtacccgcaaaattcagagaaggcctcggtgagcagtttgtgctgaccagaggactggaccaatgccttttcggctatccgatgaatgaatggaagctgattgaagaaaagctgaaggctctgccgctcaccaaaaaagacgcccgcgcatttacccgattctttttttccggtgcgaccgaatgcgaactggacaagcagggaagggttaatattgcgtcatctcttctgaattacgcaaaactggaaaaagaatgtgttgtcatcggggtttccaatcgaattgaattgtggagtaaggtaatatgggaacaatacacagaagagcaagaagattcattcgctgaaattgctgaaaacatgattggatttgatatataatggatcttcgtgcatcacaacaacaactgacaattcaattcattcctgataaaggtgggaccgacacaaatgtttcagcataagacagtacttcttcgtgaaaccgtcgacggtttaaatatcaaaccgggcggaacctatgtggactgcacccttggcggcgccgggcacagtacatatttattgcagcaattatcggaaaaaggacgcttgatcgcctttgaccaagatgacacggcgcttgaaaacgcaaagaaaacattgtccgaatacaaaggacagctcattctggtgaaaagcaactttcgttatttaaaagagtgtttacatgaacacggcattacgagtgttgacggaattttatttgatttaggagtatcctctccgcagcttgatacaccggaacggggattcagctatcatcatgacgcaccgctggacatgaggatggaccagtcggccgcccttacggcgaaagaagtcgtaaatgaatggcggtatgaggaccttgtgaggattttctttaaatacggagaagaaaaattcagcaagcagatcgcccgaaaaattgaagaggcaagagaaaaatcgcctattcaaacaaccggccaactggtcgatctaataaaggacgcaataccggctccggcaagaagaagcggaggtcatccggccaaacgtgtattccaagccatacgaatcgccgtaaacgacgagcttcaagtatttgaagaggccctcttgcaagcgatagaggtgctgaagccgggcggaagggtgtctgtgatcacttttcactcgctggaagacagaatgtgcaagacgacattcaaggaaaaatcatcacttcccgaactgcctccgggtcttcctgtgataccggaagaatttgaaccggaattaaagctgattacgagaaagcccattacggcatcaaaagaggagcttgaagaaaataaccgcgcccggtcagcgaagctccgcattgcggaaaaacgaaaataacgggcagcaaatgacaacattaaaggaggtcatcagcctatgagcaacttagcttaccagcaggaaaaacaacaacggccagtgataagtcccgaaaaaaaggtgattgtcaaaaagagggcttccattacactcggggaaaaggtgctgctcgtcctgtttgctattgccgttctctccacatcaatgtttatcgtatcaaaggcatacgcggcgtaccaatctaatattgaggtgcaaaaactggaggagaaagtatctgaaaagaataagcagatcggtgatctcgaaaagacggctgctgacttaagccagccgcagcgcctgatggatatcgctaaaaagcacggtttgaatctgaaagataaaaaagtgaaaaacatacaggaatgataacccatgccgaaaaaaaataagtttatgaacagaggagcagcgatactcagtatttgtttcgctctctttttctttgtcattctcgggagaatggcgtacattcaattaaccggtaaagcaaacggtgtagaacttgcaacaaaagcgaccgagcagcacgaaaaaaagcggacgatagaagcgagccgcggctctattcttgaccggaacggcaaagtgcttgcagaggacacggcgacatataagctcattgccgtgcttgataaaaaaatgacgagtgatccgaagcatcctcagcatgtcaaagacaaagagaaaacggcggaaaaactggcgaccgttatcaatcttgataaaagcgagattctggacatcttaaacagggatggcgcgaagcaggtggaattcggttcagccggccgcgatatctcttatgcgaaaaaacaaaagatcgaaaaaatgaatcttccgggtatttctttcttaagagatacgaagcgctattatccgaacggtgtatttttgtcaaatgttctcggctatgccgatgtgaatgaaaaaacaaacgagatacaaggctctttagggcttgaaaaaatactgaacaactatctgacggaacgcgacggatccgtcacttacgaaagtgataaatccggctggaaacttccgaacagcaaagaaaaaatcaccgcacctaaaaacggtgacaatgtatatttaaccattgatcagaaaattcaaacctttttagaagacagcatgacgaaagtagcggaaaaatataaaccgaaaaaaattatggcggctgtcgtagaaccgaaaacaggcaaagtgcttgcgatggggcagcgtccgagttttgacccgaatatcagaaacgtcaccaattattacaacgacttagtgtcgtacgcgtatgaaccgggatcgacgatgaagatctttacgcttgctgcggcgattcaggaaaatgtgttttccgcaaacgagaaatataaatcaggaacatataaagtgggaggcggaccagttaaagattggaacgatggcgccggctggggcatgacaagcttccatgacggccttatgaggtcatccaatgttgcttttgccaaactggccaacgaaaaactggggtttgaccggtttaatgagtacctgcacaaattcgggctctatcaaaaaacaggggttgatctgcccggtgaagtatcaagtaaaattaactacaaatatgattttgacaaagcgtctacggcttacggccaagcatcggcgataacgccgatccagcagcttcaggccgtcacggcgattgccaataacggcaaaatgatgaaaccttacgtcattgatcatattgtcgaccccgatacgaaaaaagtcgtcaagcagacaaaaccagagcaagcaggcacgccgatttcagccgatacggcgaaaaaagtccggaatctgctcggagaagtcgtgacgtcagacatcggaacgggaaaaccttataaaattgaaggatttgacgtcgcgggtaaaacgggaaccgcacaaattgccgggacgggcggatatttaagaggaacgagcaactatgtgttttcattcatgggcatggcgccgaaaaatgatcctaagctcgtcatctatgtagccgtgcagcagccgcaattaaaagcggggcaaagcagctctgatcctgtcgcggaaatctttaacccgacgatgaaaaacagccttcactacatgaatatcgaaccgacggaaaaaacagattccggtcaggaagaaacgaaaagccaaaagatgcctgacctgacagataagacggtcaagagcgctgagaaggaagcgaaaaatgaacatctcacaccgattgtcatcggcagcgatgttgccgtaaaagagcagtatccgacagccggagaagatctgatcaccaatcagaaaatcttcttaaaaacagacggaaagatgacgatgccggatatgtccggatggtcgagacgggaagtgcttcaattcagcaaagtatcaggcattcacatcgatgtgagcggtgaaggttacgcttcaagccaaagtgtgaaaaaaggcaaagaactgaaagaaaataccgtgatcaaggtgaaatttaaaaatcctgattaacgggacagagaagtccgcggatgcccgcgggcttcttttttatgcgccgccgttctatgtgtccaagctgaggcataaattgaaacaagcctaaataaggagtggacggtcccttgcgcgtttcaaatgtaacggttcgaaaacgtttattactggttttgctttttggcgtaatcatttttttgatcattgacagcagattaggctatgtccaattcgtgatgggagaaaagctgacttcactggctaaggattcctggagccgaaatttgccgtttgagcctgagcggggagagattcttgaccgaaacggcgtgaagctggctactaataaaagcgcgccgaccgtctttgtcgtaccgcgccagatccaaaatcccataaaaacgggcaagcttctcgcgtcagttttaaatatgtcggaagagaaggtctacaaacacattactaagaaaacctccatagaaaaaatctcacccgaggggcggaaaatttccaataaaaaagcgaaagaaatcaaagcgctcgacttaaaaggggtttatgtggctgaagacagcatccgccattatccgtacggaagctttttgtcccatgttctcggttttgccggtattgataaccagggccttctcggattggaggcttattatgatgatgacttaaaaggtgtaaagggatccgtaaaattttatacggatgccaaggggaagaaaatgcctgatgaagcggatgattacacccctccgaaagacggacttgatatgaaactgacgattgacgccaaggttcagacgattatagaaagagagctcgacaatgcagcggcgaaatataacccggacggaatgattgcggtcgcaatgaatccgaaaaacggggaagtgctcggcatgtcaagccgtcctgattttgatccggctgactatcaatcggtggatccgtctgtttacaaccggaacctgccggtatggagcacatatgaaccgggttcgacctttaagattattacgcttgcggcggctcttcaagagcaaaaagtaaacttgcaaagagaccacttttatgacaaaggatttgccgaggtcgacggcgcccgcctccgatgctggaaaaagggcggccacggttcgcaatcttatcttgaagtcgttcaaaattcctgcaaccccgggtttgtacagctgggggaacggctcggaaaacaaaagctgtttcaatatattaaggacttcggctttggaaagaaaacaggcattgatctgcaaggggaaggaacggggatcttattcccgcttgacagagtcggcccggtcgaacaggcgacaaccgctttcggacaaggggtttccgtcacgccgattcagcaggtggcagccgtttccgcagcaataaacggcggaacgctttatactccatttatcgccaaagagtgggttgatcccgttacgaaaaaaaccgttaagaaacaatcgccgattgcgaaaaggcaagttatttcccaggaaacgtcaaagcagatcagatatgctttagaaagcgtcgtcgctcagggaacggggcggaatgcctttgtggaaggatatcgcgtcggcggaaaaacaggtaccgcacaaaaggtcaaagacggcaaatatctcgaaaacaaccatatcgtctcctttatcggttttgcgccggctgatgacccgagccttgtcgtgtatgtcgcggttgataatccgaaaggcacgattcaattcgggggaaccgtcgccgcgccgattgtcggaaatatgatgagagacagtctgcctgagctcggcgtgaaaccgcgaaaaaatcaaatcgagaaaaaatatcaatggaacgacacaaaaacaatagaggttccgaatgttgtagggatgtctgtctctgatcttgagtcgctgcttgtcaatttgaatattgactcctcaggaaaaggaagcaaaattgtgaaacaatcacctgcagccggaacgaaagtaaaagaaggctcaaagatccgtgtttacttgagtgaagaatgagtctttttgaggcagccgattgttttcggctgcctcttatcataaagagaaaaaaagaagataacttttaagattaactggatgtatccttttatttacgctaaaatatgaactgtatgtttaaaagccattctgacttttataaacggttatcatgataaaagaatgaatagaatttctgagaggtttgatacaatgaaacttacaaagctgcttacatatttaatggccgaacctgttcaaaatgactttcatgaccctgacataacttcaattgagatggactccagggaagtgagaaaagggagtctttttgtgtgtataaaagggtatacggtagacggacatgattttgcccaaaaagccgcagaaaacggcgcagcggccatcgttgccgagaaagagcttgacgtcgatgttcctgtcattatcgtccgccggtcacagcgggcgctcagcgttctttctgacgcgttttacgggcagccgacaaagcagcttcagcttatcggcatcaccggcacaaacggcaaaacatcaacgacgcacatggttgatgagattttcaaaaaagcgggaagacagaccggtttaatcggaacgatgtacattaaaatcggggatgagacattcccggtcaaaaatacaacgcccgaaagcgtcacactgcaaaaaacgttcaagaaaatgaatgatgagcatgttgacacagctattatggaagtgtcttctcacgctctgtcactcggcagggttcacggctgcgattatgatatcgccgtattcacgaacctgacgcaggaccatttagattatcacaagacgatggaagactacagacaggctaaaagcctcctgttttcccagctgggcggctcctttaaccacgaaaagccgaagcgggccgttttaaacgcagatgacaaagccagtgcttattttgaaaaagtgacggcggcgcacatccttacatacggaatcgagaatgatgccgatgtcatggcgaaacaaatcgagatctctgcgcaaggcacaagctttgaactcgttacgccaaaaggaacaaagcagatcacagtttcactcgtcggccgcttcaacgtgtataacgtactggctgcagcggcgacagcgatcgcagcgggtctgccgtttgatacgatcacaagcgctcttgaagagctgcaaggtgtcagaggccggtttgaactggtgaatcacaatcagccgtttcctgtggttgtcgattacgcgcacacgcctgacagtctggaaaacgtcctgaatacatgcaaagacatgacagagggcaagcttttcgtcgtcgtcggctgcggcggagaccgggacaaaacgaaacgcccgaaaatggcggaaattgcggtgcggattgccgacgaaccgattttcacttcagataacccgagaagcgaggacccgctggccatattaagagatatggaaagaggggtagaaggcacttactatcacagtatcgcaaaccgcgagcaggctatcttttttgccattgccaacgcgaaaaagggagatgtggttctgattgccgggaaagggcatgaaacctatcagcagatcggcaatgaaacattcgactttgatgacgccgaagtagcgggaagagctattgttgagctgaataaaaagtaaaacaggaaagagtgttagaatgagggaaatgaaaagaattacggggacacaatgtgaatatgataaatacgtatgtcgtttgaacgaaacgggaggagaaaagagcaatgcttgagcaagtgattttatttacaataataatgggatttttaatcagtgttctgatatctccgattcttatcccgtttttaagacgtttaaaattcggccaaagtatcagggaagaggggccgaaatcacatatgaaaaaatcagggacgccgacgatgggcggggtcatgattattgtatccatcgccattacggcgattgtcatgacgcagaaattttcgcatctgagcgcggaaatgtttcttctgctgtttgtcacgatcggatacggcctgctcggctttctggatgactatattaaagtagtaatgaaacggaatctcggattgacgtcgaagcagaaattgatcggccagatcattattgccattgtattttacggagtatatcattattgccatttttcaaccggcatcagggtgccgggcacacatctgtcaatcgatctcggctggggatactttatcctcgttctctttatgcttgtcggaggttcaaatgccgtcaacctgacagacggtctggacggtctcttgtccggtaccgcggctatcgcattcggcgctttcgccatccttgcgtggaaccagtcacaatatgacgttgcgattttctcggttgccgttgtcggcgccgttctcggttttcttgtattcaacgcccatcccgccaaggtatttatgggggataccggttcgcttgcgctcggaggagcgatcgtgaccgttgccattctgacgaagcttgaaattctgctcgtcattatcggcggagtatttgttattgagaccttatctgttatcttacaagtcatcagctttaaaacgacaggaaaacgaatctttaagatgagtccgcttcaccaccattacgaattggtcggatggtctgaatggagagttgtcgtcacattctggactgcgggactgctgcttgccgttttaggaatttacatcgaggtgtggttataagtggaaaacgaactttttttgcaaaaacaaaactttctagtcctcggactggcgaaaagcggatatgcggctgcgtcgattcttcatgaaaaaggcattaacgtcgtcgtgaatgatcaaaaagcctttgaagagaacgaacctgcccaaaggcttgcagaaagaggaattgaagtcatctgcggtgagcatccgacgtcactttttgatcagcatcacattaccattctgatcaaaaatcccggaatcccgtatgaaaatatcatggtggaggaagcgcaaagaagaggcatcccggtctggacggaaatcgagcttgcgtattatatcaccaatgcaaaattcatcggcattacaggttcaaacgggaaaacaacaacgacgaccctgatttatgaaatgctgaaagctgactcgataaaggcgctgatcgcagggaatatcggcactgtcgccagtgaagtggcttatcgtgctgacggtgatgaatggatcgtcacagagctttcttcgttccagcttatggggactcatgcgttcagacctgaaatcggcctgattttaaatgtgttcgacgctcatttggattaccatcacagccgtgaaaactatgaaaaagccaagcagaacgtgtatcttcatcagcttgagagtgatacggccatcgtcaatcaaagcgatgaaacagtcgtgcggcttgccgaaagcggaaaagccggcaccgttccgttttcagttcaccaggaactgtcaagcggcgcattcattaaagacggaatgctgatgttcggcgatgaagcgattctgcctgttgatgacatcgtactgccgggcgcgcacaatttagaaaatatattggccgctgtagccgcggcaaaaacggcgggcgcgtctaataaagcgattcagaaggtgctgacaagctttaccggtgtcaaacaccgtctgcagtatgtaactgcgatccagaatcgtagattttataatgacagcaaagcgacgaatattttggccacaagcaaagcgctctccgcgttcaaagcaccggttattctgcttgcaggcggactggaccgcggcaacggttttgacgacctgaaaccgtatatggacaatgtcaaagcggtcctgacgttcggacagacagcgtcgaagatagaaaaactgggcaatgagctgggaatacaacatgtcaaacgtgtcgataatgttgaacaagcagtatctgcggcgtttgcgctctcaaatgaaggagacgtcatcctcttgtcacccgcgtgtgcaagctgggatcagttcaaaacatttgaagaacgcggtgacatgtttatagatgccgtgcatatgcttaagtaagggcttgtctctgttcatcggcagccctaaatgacttatgcttggggtgtcgattgctttgactactaaaaaaacagcgcctgatttgttattagttatcattacgttattgcttttaacaataggattaattatggtctacagtgcaagtgcggtatgggcggattataaatttgacgactcgtttttcttcgcgaaacggcagctgctgtttgcggggatcggcgtcattgccatgtttttcattatgaatgtggattattggacatggcgcacatggtcgaagctgcttctgatcatttgtttttttctgcttgtgcttgtgctgattccgggagtcggaatggtgcggaacggttcaagaagctggatcggagtgggagcgttcagcattcagccttcggagtttatgaaactcgcgatgattgcgtttctggctaaatttctttctgaaaaacagaagaatattacgtcattcagacgcggattcgttcccgcgctcggaatcgtgttttctgcatttattattattatgtgccagccagacctgggaacggggacggtaatggtgggcacgtgcatcgtgatgatttttgtttccggtgcgcgaatcgctcattttgcgttcctcggactcatcggtttaagcggatttgcggcactagttctgtccgctccttatcggattaaacggattacctcttacttaaacccgtgggaggatccgcttggaagcggatttcagatcattcagtcgctctatgccgtaggtccgggcggtctgttcgggatggggctcggtcaaagccggcaaaagtttttttacctgccggagccgcaaaccgatttcatttttgctattttatctgaggaactcggctttatcggcggttcgctcatattgctgctgttcagtattttattatggcggggcgtcaggattgccctcggcgcgccggatttatacggaagctttgtcgccatcggtattatttctatgatagctattcaagtcatgattaatatcggcgttgtgacggggctgatcccggtaacaggaattacgctgccgtttttaagctacggaggctcatcactgacgctgatgctcgcagcggtcggcgtacttttaaatgtcagccggtactcgaggtattgatctgtatcttgcctcatcactcatgatttattcgttatctataaaaaaacagacaacatcaataaccctgtcctaaaaaacagggttatcgctatgtgattaagggggacatacgaatgcgtattgcagtaagcggaggcggaaccggaggacatatttatccggccctggcctttattaaagaagttcagcgccggcatccggatgtggaatttttgtatatcggaacagagaacggtcttgagaaaaaaattgttgaacgggaaaatatcccgttccgcgccattgaaattacaggtttcaaacgaaaactttcttttgaaaatgtaaaaaccgtcatgcgtttcttaaaaggcgtgacgaaaagcaaatcatatttaaaagagtttaaaccggatgccgttatcggtacaggcggctatgtatgcggtccggttgtatacgcggcggcaaaaatgggaattccgacgatcattcatgagcaaaacagcctgcccggcatcacaaataagtttctctcgaaatatgttaataaggtagcaatttgctttgaagaggcaaaatcgcattttcctgctgaaaaagttgtgtttacgggaaacccgagagcctctgaagtcgtctcaattaagacaggccgctcattaactgagttcgggctgaaagacaatcaaaaaacggtgctcattttcggcggaagcagaggcgcggctcccattaaccgtgccgttatagatatgcaggaagaattgaaaacgagaccttaccaagtgctttatattaccggggaagtgcattacgagaaggtaacggctgagctgaaaggcggaaaagccgctgataatatggtgacaaaaccgtttttgcaccaaatgccggagtacttacaatcaattgatgtcattgtggccagagccggagcgacgacgattgcggaaatcaccgctctcggcattccgagcgtgcttattccgagcccgtatgtgacagccaatcaccaggaagtcaatgcgaaggcgctcagccagcatgacgctgcaatcgtactgaaggaaaccgagctcagcggagaaaaactgatcgctgcgctggacaaaatcgtcatgaatgaagaaaccttaaaagacatgagtgagcggacaaaatcactcggtgttccggatgcggcagccagactgtacagtatcatggaagacataaaaaaatagagcaaatggaatgcggaggtttatgatggagaacgtaattcaggaattaagagaccgcgaagtcggcaaagtgctggaacaagaaccgctcgcgaaccatacaacgatgaaaatcggcggtccggcggacattttgatcatccccaaccgtgtggaagcggtcaaagatattatggatattgtgaaaaaacatgatctgccatggacggttatcggccgcggttcaaatctgctcgtgcttgatgaaggcattagaggagttgtcatcaaactgggcgcgggtctggatcatttggagattgacggtgatcaggtgacggtcggaggcggctattcggtcgtccggcttgcgacttccatgagtaaaaaaggaatgtccggtctcgaatttgcagcgggcattcccggatcaatcggcggagccgtctatatgaatgccggggcgcacggatctgatatgagtgagattcttgtgaaagcccgtatcttatttgaagacggcacaatcgaatggctgacaaacgaagagatggatttcagctacagaacgtctgttttgcagaaaaaacgccccggcgtctgtctcgaggcagttcttcagcttgagcaaaaggaacgggaagccattacggcgcaaatgcagcagaacaaagattacagaaaaaacactcagccgtattcaagcccatgcgccgggagcatattcagaaatccgctgccggatcatgccggaaacctcgttgaaaaagcgggattaaaaggacatcagatcggcggagcaaaagtgtccgaaatgcacgggaattttatcgtcaatgccggcggagcgactgccaaggacgttctcgacctgattgaatatgtgaaaaagacaatccgtgagcagtatgatgttgacatgcatacagaagttgaaatcatcggagggaatcgttaaaaggttctctgattacgtgagctcatgtgatatacttttaacaaatgtcaaacggcatcacagcatgccgtttgtttttcaatcagatgaatgtcaagctgtttcattcttagtgaggtggacaggcagtgaacccaaatcatgaaagagaaaaaattgtaaatattgaagagcggattccgaaaatcaaagagcagcggaagcaaaaagcaaaccgccggctgatttcattcattgtgctcttttttatgatggtgctgatcatcgtgtacttgcagatgccgatcagcaaagtgtcttctgtcaccgtttccggaaacgaaaacgtgtctgtaaaagagatcaacgcgctttctgatatacataacggacaaaccgagttctggagtctgaacaagaaaaaaacagaagaaaagattgagcagaataagctggtgaaaaaggcggaactttcaaaagtatttcctaacaaagtcagcattcacattgaagaatacaagacgatcgcgtatctgcagcgacatgatgtatattatgaagtgctcgaaaacggcactgtgctgccgaacgaagtcacgccggatgacgcgggcccgattttggttgactggacaaacgcgaaaaagcgggtcaaaatggcggagcagcttgataagctttccggttcgcttaagcagtcgatttctgaaatctattatacaccggtaaaaatggatcaggaccggatcaagctgtatatgaacgacgggtatgtagttaccgcttctattaaaacgtttgccggccggatgaagacctatccttctatcgtttcccagctggacggcgggaaaaaggggattatccacttagaagtcgctacgtattttgaagaatttaacaaaggtaaatccggcaagaaaaaagaaaatgattaatagttctaaagaactaatttaaaggtgattcaaaagaatctattgcgatcagcggggcagccgatataaccgatagcggaatcattatgactatgtttgtttttgtccggtatatggctgccggacaagcggaaaattctcaatgcaatgggcgtgtcttctgcagtgagcattgcatttggaattttcctcctgtttcttcttttttcggatgtttctggcaatatctatagcttttctggaggttcatcttagtgtagactaatggaaagcgggtatatttgcatctggtttgcacagtatggcaccgtgacaggaaatcttacggtaaggtgggccgtctctaaaaaaaataaaaaaaatacgatataaaagaggatatacatagaatataacgaatagtttcattaaacataaattgtgagaaatcagataagaatttgttgatgctgttgtttttgttacacacttgtaaagccacattcattgtattgttgttccgcaaataatagaatagaatttgatcgaaatgtgaggaggtgccatagaatgaacaacaatgaactttacgtcagtcttgacatcggtacgtccaatacaaaagtgatcgtcggagaaatgacagatgattcccttaacattatcggagtgggaaatgtaccgtctgaagggttgaaaaaaggctcaatcgttgatatagatgaaaccgttcattctataagaaaagcgtttgaccaagctgaaagaatggtaggttttccgctgaaaaaagccattgttggcgttaatggaaattatattcatattcaagatacgaacggcgttgtcgctgtttccagtgaaaacaaagaaattcacgttgaagacgtccgcagggtaatggaagcggcacaggtcgtgtcagttccgcatgagcagctgatcgtagacgtcgttccgaaacagtttatcgttgacggaagagacgaaattaccgatccgaaaaaaatgctcggcgtgcgcctggaagtagaaggcacgctgattaccggctccaaaacgatcttacataatttacttcgctgtgtggagagagcgggcgttgaaattactgatatctgcctgcagccgcttgcggccggttcggcggctttgtcaaaagacgaaaaaaacctcggagtcgccatgattgatatcggcggcggctcgacgacggtggcggtatttgaacaggggcacctgaaggagacagccgtcattccgctcggaggcgaaaacatcacgaaagatgtatcgatcggattgcgcacttccaccgaagaggctgaaagagtaaaaaaacaattcggacatgcattctacgatgaggcttcagaagatgaagtatttgaagtcaccgtcataggaacgaatcaaaagcaatcttttacacagcaggaaattgctaatattattgaagcaagagtggaagagattcttgagattgccgcagccgaaattgagcatatgggaattacagatctgcccggcggctttgtgctgaccggcggacaggccgcaatgcccggagtgctttcattggcacaggaagtgctgaggcacaatgtaagggtcgcaagcccgaattatatcggtgtaagagaccctcagtatatgacgggtgtcggcttgatacaatttgcctgccgaaatgccagaattcagggaagaaaaataggctttcatatgccggaagaagccgtgcaggaaatcgcggtctctcacgaagaagaacatcatcagcggccagaggcgcagcagcgtccaaaagcaaaacaaaaaacacaagccgaacacaacaaaccgagcaaaatgaaaaaactattaagcatgttttgggaatagattgatagtcattcggcagattaggaggatttagcatgttggatttcgaaacaaacatagacggcttagcatcaattaaagtaatcggagtaggaggcggcggtaataacgcggtcaaccgaatgattgaaaatgaagtgcagggtgtagagtacattgcggtaaacacggacgcgcaagctcttaacctgtcaaaagcggaagtgaaaatgcagatcggggaaaagctgacccgcggtctcggagcgggagcgaatccggaagtcggcaaaaaagccgctgaagaaagtaaggaacaaatcgaagaagcgctaaaaggcgctgacatggtgttcgttacagccggaatgggaggcggtaccggaacgggagccgcaccggttatcgcgcaaatcgcaaaggacttaggcgctttgactgtcggtgtcgtaacaagaccgtttacatttgaaggaagaaaacgtcagctgcaggctgcaggcggtatcacggcaatgaaagaagccgttgacacactgatcgttattccgaatgaccgcattcttgaaattgtcgataaaaacacaccgatgcttgaagcattccgtgaagctgataacgtgcttcgccaaggggtgcaaggtatctctgacctcatcgcgacgcctggtttaatcaacttggactttgccgatgtcaaaaccatcatgtccaacaaaggttcagcattgatggggatcgggatcgctacgggcgaaagccgtgctgctgaagccgccaaaaaggcgatctccagtccgttactggaagcggcaatcgacggagcgcaaggtgttttgatgaacattacgggaggtacaaacctgagcctctacgaagtgcaggaagcagccgacatcgtcgcttctgcatccgaccctgatgtcaacatgattttcggttcagttatcaatgaaaatctgaaagatgaaatcgtcgtcaccgttattgcgaccggttttatcgaacaggaaaaagatgactcaaaaccgcagcgtccgactttaaaccaaggattgaagtctcaaagccaaaacgctgcgaaacgtgagccgaaacgagaagaaacacagcatcaaaacacggtgaaccgccatacatcacagccggcggatgatgccctcgacattcctacatttttaagaaaccgcaacaaacgcggctgatgtaaaaaaggacaagaccacatggttttgtcctttttcttttttgtgtacagtcttccttcctatccccatgatctatacagtgaaaaaagaaactttatacctatgacgaattgattgttttttagtttcatacggctttctacagaatgcgacaatatctggatggaagattgtctacatttaacgtacagcatcgaaatgacaaacgattccaattatgaaggagggatacacattttatagggcgttaccaaataaggggggatacgattgaagaaaaaaacaagaaacagatggacaggctccgttttaagcgcgattgtcgtcagttccctgttgtttccgggtgcagccggagcgaacagcacaccgggggcagtttctttcaccaaagatctttcttcctctaagagcattcagcataagatttccgattcagtcaagaagcgttttgaaaaaaatgataaagtcacgtttcttatcaaatttaaagagaaagccaatacgaaaaaagcggtcaaagaagcagaaaaaaacgccaagtctcaatcgctttccgcagcaaaaaccgaatatcaaaagcggtcagccgtcgtttcttctttaaaactggcggctcatgatgcgcagcagaatctgaaaacatatttggaaaaacaaaaaaagaaaggcaaggctgatcacatccattcctattatattgttaacggaatggcagtcactgcttcgaaagaggtaatggaaaaagccgcctcatttcctgaagtagaaaaagttcttccgaatgaaaaacgtcagcttactcaacgacaatcaaaagctccttttcaaatgaagaaaaaacaaaaagagatcaaagcaaaggaaggcatcgaatggaatatcagccaaattgatgcgccacaggcctgggcttcaggatacgacggaaccggcacggttgtcgcctccattgatacgggagttcagtgggatcatccggcgcttaaagaaaaataccggggttacgatcctgaaaatcccgcagcgccgaatcatgaaatgaactggtatgatgccgtgtcccataaagacgctccctacgatgatcttgaacacggcactcatgtaacagggaccatgacgggttcagaacctgacggctcaaatcaaatcggtgtggctccgggggcgaaatggatcgcagtaaaagcattttcagatgacggaggaactgatgccgatattttggatgccggtgaatgggtgctcgcgcctaaagataaaaacggcacgccccatcccgagatggcgccggatgttgtcaataattcctgggcaggcggttcgggaatggacgagtggtaccgcgatatggtgaatgcgtggagagcggcagggatttttccggaattctctgcgggaaatgaagacttatttacaccgggaggaccgggttcaatcgcaaacccggccaattatcctgaagcatttgcgacaggtgcgactgacatcgacaagaaactcgctgatttctcacttcaaggcccctcaccgtatcatgaaacaaaaccggacatttcggctccgggagtgaatatccgttcttcgattcctggaggaacatacgaaggcggctgggacggaacttcaatggccgggccgcatgtggcggcgacggcggctttgttaaggcaggcgaacgcctctattacggtcgatgaaatggaagacgttttgacgcgcaccgcggaaaagctgacagattccgtttttccggaatcaccgaataacggttacggccacggtctcgttaacgcttttgatgccgtttctgccgtaacggacggaatcggaggcgtagaaggcaaggtctcttctgcgggcgaagatcacaatccgcccagctttcaccatgaaccggtctcagcggcttacaaaggggcacaccttccgttaacggttacagcagaagacgatgtaagtgtaactgaagtcatcctttcctatcagtttgatgaaggaaagtggaaaacgacagccgccgttcaaaaaagcggtgatgaaaaaaagggaacataccaggcggagattccggatgtaacgggaagcaaggtaagttataaatggaccataaaagatttcggaggtcattctgtagaatctgatacgtaccgggctgacgtgaaaccgagcattacggcgggatacaaagaggattttgaatcacagccggcgggctggtccagttacgggacacacgaccaatgggaatggggtatcccgagttcagggcccggcgccgcattttccggagataaagtgtatgcgacgaatctgtccggcccttatgccgattcagccaacatgaatttggtgatgcctccgattcaagttccggaaacaggacggctgtttttgcaatttaaaagctggcacaagctcgaagaattttttgattacgggtatgtgttcgttcttccggaaggaaaatcaaattgggagcaggcggccgtttacaatggtgactccgcaggatggaacgatgaagaggcagatttatctgcgtataaaggccaaaacataaagctcatgtttaatatgcagtcagacgaagtactcaatgaagacggatggtatatcgatgatgtccggctttcaagcagccctctcggcaaggcggctaaaaaaagtaaacacaatagacaaacacctcccggccacctgaagaaaaaagccgtcagtccgaaacaggccaaaccggcagtgaaatcacccggaaaaagagtaaaacgtgaaacaaacctcctccctctcagagcgcaaatcagtgtcgccgagacggggaaatccgtatattccgaccctgcaagcggaagctacagcctgtcgcataaggcgggaagctatacgctgaaagccgaggcttacggatttaagtccgcttcgaaacaagtttctattcaatcagacaaaaccgcacaggcagactttacactggagcaaatgccgtccggcacgctaaaaggaaccatcaccaatcagtcaacaggcgaaccggtaaaaggggctgcgctttatgtggctgaggatgccgcaattgaaccggcggtgacaaacgataaaggggaatattcgcttaaggcgtacgaaggctcctacacaatcaaagtagcggcaaaaggcttttacaatagcgaattttccgttgacatcaaaggagatgctgaaaaaaacgtcaagcttaagccgtatatcggttatgaaggggaaattgcctatgataacggaacggaagaagccgcgctgtcatattttaaagccggcagcaaatctgcagtaaagatgacgcttaaagacggaaaagaacacggtatgctgacgggaggcctttttaaattttggggcgccgactggcctgatccgggcggtaccgaattccaagcagaagtatatgatgcatccggccctgatggagctccgggcagcaaaattgccggcccgttccaagctgaagcgcttcgaaacggcgaatggaccaaagtggatctcagctcaaaaggaatcgcggtcggaaaggatttttatcttgtgttccgccagacgaaacccgatccttatacacctgccctgtcatctgatgacggcagtccgtactcgaacagaaactggcaatacctcgacggccgctggtctaaaaccgataaatcagacggaaactttatgatcagggctttggtcgactacgaagcttctgtgcctgacataacgtcgcctgaagaccggtcatttacaaacaagaggtcaatcacggtgaaaggaacggcttcaccaaaaaccgctgtccgtcttaccaataacggtaaaaccgccgcagaaacgaaagcagatgcagacggcaatttccaggccggcgtcacactcactgaagatgccaatcggctgacggcggcatctgtgacagacagcgggtcaaccgatgagtcacgccctgtcacggtcatactggatgaggataagccggatgtgacgattgacagtccggcaaacggtgataaaacaaataaagaagcagtgaccgtaaaaggaaaagtgcacgacgcccatttagaatgggtaaaggtgaacggaaaaaaagctgaagtaaataacggttcttatcaagcgagaacccttctggaaaacggcagcaatgagatcaaggtcacggcctcagatgaagcgggtaacaaaacaacgaaaaagacggtaatcgatgtcaattacaatgctcccgtcatttccggattggttcccggagcggataaggaattaaaagccggagaatcagtgaaaatcgctttttcaagcggaaagaaattagacgcttccttcgttatccgtctgcctctgacaaacgcccgggcagggagccaaaacgcaacagagcttccgctgagagaaatttctccgggacgatatgagggttactggacggcgacctcttccatcaaagcaagcggagcaaaaattgacgttatcgcaagagatgactacggaaatgaaacgagacagacggctaaaggaaaactttatatcaatgagtaaaaacagagcgctgccagatcacggcagcgcttttttagttgaaacggataataggaaagcaaccctttcggccctcgacaaataaaacggttatcccttaaaaattgtactttaccctcaacattaattgacagactttcccacagagcttgctttatacttatgaaacaagagagagaaacagataagtaagacaaaagaggaaaggggtcagatgtgaaaatctatctggatgtcatttggctgttgaacttttgttttgattctcttttgcttttattgaccgcctttattttaaaacgccaggtgaaaaaaagaagagtggccgccggcggtttcatcgggtcagccattgtgcttctgatgtttacgcctgtttctccctttgtggagcatccggcgggaaaaatggcgttttcagtagtcatcgtgcttgcggcttttggctttaaacggttccgatacttttttcaaaatttgttcgccttttatttcgcgacttttctcgtcggcgggggaatgatcggcgtacattccctgctgcagacagaatcaattgtgcagcaaggggtaatggtcacaagccagaccggattcggcgacccgatcagctggatgtttgtagttatcggatttccggccatatggtttttctcgaaaaagagaattgaagacatcgagacgaagtccattcagtacgatgaacttgtcatggtgcaggcggaattcagcggacagacaatccgcgcgaaaggattggtggattccgggaatcagctgtatgatccgctgacgaaaacgccggtcatgatccttcacattgacaaattcgctctgattctcagcgaaaaggaaacggacctcatcaaatccgccagcccgcttgaagtgatagagcagcttgatgattcgttccgccatgcggataagctgaggctgattccatacaggggcgtcggccaggacaatcaatttttactctgtttaaagccggattacgtcacgattttaacaaaagacgaaatgatcgcttgtgaaaaatgcctgatcggcatcagcacgaaaccattatccgcggacggtgaatttgacggaatcgttcatccgaagatgctgacagggaaggctgtaaaacatgtttcctgacgaaaagtctgttattcatcatactcaaaacgcgttgtatttagaagggggaggaagatgaaaaaacttaagctgcgtctgacatatttgtggtataaatggctgatgaaactcggactgaaaagcgatgaagtgtattacataggaggaagcgaggcgctgccgccgcctttgtctaaagaagaggagcaggtgctcttattaaagctgccgagcggggatcaggcggcgcgggccatcctgattgagagaaacttacgtcttgtcgtttacattgcccgcaaattcgaaaataccggcatcaacatcgaggacttaatcagcatcggcaccatcggtttgatcaaagcggtaaacacttttaatccggaaaagaaaatcaaactcgccacctacgcgtcgcgatgtatcgaaaacgaaattttaatgtacttgcgccgaaacaataaaatccgttcagaggtgtcctttgatgaaccgctgaatattgattgggacggaaacgagctgctgctttcggatgtgctcggcacagatgatgatattattacaaaagacattgaagccaatgtggataaaaaacttttgaaaaaagcgcttgagcaattaaacgaaagagaaaagcagattatggaactgcgtttcgggcttgtcggagaagaagaaaaaactcaaaaagatgtagccgacatgatggggatttcacaatcttatatctcccggctcgaaaagcggattatcaaaagactgagaaaagagtttaacaaaatggtgtaaaattttttccatctgacagcccttactgccgcaaggattgccgtcgccggatgtttatttctgtaaaatggcggtgcatatttttcccacccgaggagatacttaacgttgtacagcagctcctagtgggagggaaaaacgtgtcaagaaataaagtcgaaatttgcggggtggatacctccaaattaccggtgctcaagaatgaagagatgagaaagctgtttaggcaattacaggatgagggcgatgattcagcgagggaaaagcttgtaaacggcaatctgcgccttgtcttaagcgtcattcagaggtttaacaacagaggagagtatgttgatgacttatttcaggtcggctgcatcggactaatgaaatccattgataattttgacctaagccataatgttaagttttcaacatacgctgtaccgatgatcatcggagaaatccgcagatatttgcgggataacaatccgatccgcgtctcgaggtcgcttcgcgatatcgcatataaagcgcttcaagtaagagagcggttaatcagtgagacaagcagggagccgacagcagaggaaatcgccaaagttcttgaagtgccccatgaagaaattgtgtttgcccttgacgccatccaggatccggtttcactgtttgagccgatttataatgacggcggcgatccgatttacgtgatggaccagatcagcgatgagcgcaataaggatacacaatggattgaggagctggctctgaaagaaggcatgagaagactgaacgaacgggaaaaaatgattttgcgaaagcgctttttccaagggaaaacccagatggaagtcgctgaagaaatcggcatatcccaagctcaggtctcaaggcttgaaaaggcagccattaaacaaatgaataagaatatccatcaataacggaaaaagcctttaaaccttgtttaaaggcttttttcatgcgatggtttacgtttgcaaaaaagtgatgtattctaatgtgtaaaagtttttagaaaatttaaacaaagtaaacgggggaaactgcaatgattttacagctggacagtgtgtcattaaaaagaaacgggaaatggattttgaaagatatcaactggcgcgtcgagaaaaacgaaaattgggtgctgtacggattaaacggagccggaaaaacggctttgctgaatatgttatgctcttattacttccccacttcaggagagatgcaggtgctcggccatcaattcggcaaaacagagctcggtgacaggctcagaaggaaaattggccttgtttcggcaggtcttcagcacaaattatatgccgcggactccgcttttgaaatcgccctcagcggcgcgtacgcctcaatcgggctgtacgaaactccgagtgagcaggtaagggaaaaagcgatcggtcttctgaaggatttgggtgccatcggttacgccgacagacggtatgaaacattatcacaaggggaaagacagagagcgctgattgcgcgggcgcttatggctgatccggaactgctgattttggacgaacccgtgacgggtcttgattttatggcaagggagcagctgctggacacgattacgtcgatcgccgaaaaagaaaatgcgccgtccatcctttatgtcacccatcacgctgaagaaattctgccggtatttgatcaggcgctgcttttaaaacagggcgaggtgttcgcctcagggaaaatcagggacatgctttctgacgagcggcttacagcgtttttcgatatgcctgtcaatgtcttatggaacaatggccgcccgtttttaacacgtgcaaaagaggcatcatccgtaaaataacataaattcaccctgggggtgctgccatgcggctgagagagacgttgtctcaacccttaaaggaccggatccggatcatgccggcggagggaagcggtgaaaaaagcggaggaagacccgttttttacccgtttcatttcatgaatgaaacggtttttttgatacagccaaaggggagatttccaatgcatcagattgatatgctgttacaccaggcggagaaacggcggcacgacttcatacatattgctgaaagattgatagcctttccgactccggccccgccagcaagaaatacggcagaagcccaaaagtgggtggccggctttttaaaagaaacgggctgctcggtcgatatgtgggatgtgtatccggaagatccgaatgtagtcggtgttttaaaagggacagattcaagcaggcatcaaagcctgattttaaacggacacattgatgtggcagaagccgggggcgaagactggcactctgacccgtttcagccgcacgtaaaagacggcatgctgatcggaaggggcgccgctgatatgaaagggggtttggcgtgtgctcttttctctctgaagctgatccatgatgccggcattaagcttccgggcgacctcattgtacagtctgtaatcggagaagaagtcggtgaggcggggacgctggaatgctgcaaacgcggctatcacgcggattttgccgttgtcgcggatacgagcagcctgcatattcaagggcagggcggagtcatcaccggctggatagaattgaaaagcaaacaaacatttcatgacggcatgaggcgcaatatgattcatgcgggcggaggcacattcggagcgagcgccatcgaaaaaatggcgaaaatcatcactgccttgggagagctggagcgccactgggcggtaaccaaaagctaccccggctttgcgcccggcaccaatacgatcaaccctgccgtcattgaaggcggaagacacgcagcgtttgtcgccgatgaatgccggttatggatcaccgtccacttttatccgaacgaaacgcacgaacaagcagccgcagaaatcgaagactatattaatcgtgtcgctgacagtgatctgtggctcaaagaaaacaggccggtgttcaaatggggcggatcttcgatgattgaagacagaggagaggtgttcccggcgctggaaatcgacccggatcatccggcagtttctgtcttggctgcatcacactcagccgtcagaaaacaggagcccgtcattgatgtttcccaaaccgtaactgacggagggtggctttatcatgccgggattccgagcgtcatatacggtcccggcgatttaaaaaacgcccactccgtaaacgaggaagtgtccgttgatgagcttatggactatacgaaaattatgctgagatttatcctcgcctggtgcagccgcaaaaaagattgcccgatgtgacaaggttcagcccggccgttcatataataggaaaaagaacgggcaaagggcgtgatacggatgatcagcatatctgaatttcaaataaaagatgtggtaaacgtgtccaacggaaaaaaactcggaagcatcggtgatattgatattaacgtgacaacgggaaaaattcaggcgattattttaggcggcagcggaaaagttctcggttttttcggaaaagaagaggaaatgatcattccttggcgaaatatagttaaaattggggaagatgtcatcttagtgcgtgtaaacgaaccaaaggggggagcgtaatcctccctttacttgtaaaaagccggaaatctcaatgtttccggcacatttatttatctcatttttcaatcagccgctaaacgtatgcttaaaattgtgttaaaatgagtgggaaattacgcttttttaatgtttgtcgaaaggttggatctccatgaatacatatcacccgtttagtcttaccaccccctcggcactcatgatagaagactggaactgtgtgaatcagcttaacacaaaggtcatcgccggattcacaacgaaaaacggcggtgtcagcaatcctccgtatgagtcattaaataccggattgcacgtccgggacaaagctcatgatgttgtgacaaaccgtgaagtcatagcgtccttatgcggtactgatctggattcctgggtgttcgccgaccagacacatgaaaaccgcgtccggcgcgtgacagccggggataaaggaaaaggagcgagagactattcttccgcattccgcgggacggacgggctctacacgaaagatgcgaatctttttttggccctttgttttgcggactgtgtgcccttgtatttttatgacccggtgaaatccattatcggcgctgcccatgccggatggaaggggacggtcaaacaaatcggacgcatcatgacggaacgctgggtaaacgaagaaggctcccgtttaacagatattcaggctgtcatcggtccgtccatcagcgcgggaagctatacagtcgacgaccgcgtcatcaatgaagtgcgggcgctgccttttacggctgaatccgccatatgcgaaacggaaaaaggccagtatcagcttgatttaaaagaggtcaaccgtcttcttctgatacattgcggcattccggaagaaaacatttcagtcagcggtttatgcaccgaacgagagcgtgaactattcttttcacaccgccgcgacaaagggaaaacgggacgcatgatgtcctttatcggaatgaaggaggcgtaagatcttgcgtgttgctgatcaattacgacatataaacgaaagaataaacgaagcatgtaacagatcgggccgaagccccgaagatgttactgtcatcgcggttacaaaatacgtatcagccgaaagggctcaagaggccgttgatgccggtattacaagtctgggagaaaaccgggatgccgagcttatccataagcaggaagtcatcaaaggcagcccggagtggcactttatcggcagtcttcagtccagaaaggtgaaggccgtcgttgaccgtgtatcttatattcattccttagacagactgtcattggcaaaagagattgaaaaacgggcgcagcatgcggttcgctgttttgtgcaggtgaatacttcgcttgagccgtctaagcacggtttgaaaacagaggaggtcatcccctttatcagagagctttctgagtttagaaacatttctgtagagggcctgatgacgatggctcccctgacagacgatacagaaacgatcagagcctgcttccggcaattgcgtgatctgagggatcaggtgcaaaaactgcatcagacaaacgcaccgtgccgggaactgtcaatgggcatgtcaaatgattatgaaatcgctgttgaagagggcgcaacttttatcagaatcggctcttcattagtcggaaatgaaccggggggtgtaaacaaatgagcatgaaaaataaactgaaaaactttttctcaatggatgaggaggagtacgagtacgaatacattgaaacggagcaggatcatccggaagagcatgaacagcagaaagataaacagcctgcttacgctcagaagccgcagggcaagcagaacgtagtaagcttgcaaagtgttcagaaatcctctaaagtggtgttgagtgaaccgcgtgtatatgcggaagcgcaggaaatcgccgatcatttaaagaacaggcgggcggttgtcgtcaatctgcagcgcatccagcatgatcaggcgaaaagaatcgtcgactttttaagcggtaccgtctacgccatcggcggcgacattcagagaatcggttcagatatttttctgtgcacgcctgataatgtcgacgtttccggcacgatttcggagcttataaatgaagacgaacatcagaggtggtaaagcaggatgattctttatcaaattttttccgttctgagttatttaatttacatctactcgtttgccctgatcatctatatctttatgtcatgggtgccgagtacgagagaaacggcggtcggacggtttctcgcagcgatttgcgaaccgtatttagagccgttcagaaggatcattccgcccattgccatgctggatatatccccgattgtagcgattatcgtgcttcggtttgccacgacgggactttggggcctataccgcatgatcgcaatgtatacttgaatgcgacagtttgatatgggcttggcaccagccaagcctctttacatagaaaggaaagaacatgagcgatatttaccagcacttcagacaagacgagcggccttttattgatcaggcgcttgaatggaaacagattgtcctggaccagtatcggatgaagctgactgatttcttagatcccagagaacaggtcattgtaaaagccgttatcggcgacgcctgcggtcttgcgtttttcggaggatatgacagagctgagcgcaaacgcgcgattttataccctgaatatatggaacctgaacaggatgattttgagcttcgggcttttgacgttcaatacgctgaaaaattcgtcagcattgaccaccgctctcttctcggatcattaatggggatcggcttaaagcggcagaaatacggcgatctgattttctctgaggaagccgtgcagctgatcgtctccggtgaaatcgccgattttgtcagcactcagctgaccaaggcgggcaaagcgccggtaaagcttgagaaaatcgagctttccgctcttcacattcccgcttcagatgtcgaaataagggatgacacggtttcttcattgcgtctcgacgccgtctgcgcttcaatgagcaggcaatcccggcagaaagcgcaggcgcttgtgaaaaacgggctcgttaaggtgaattggaaagccattgaagatccgtcttatcaggttgctgaaggggacatgctctcgattcgcggcttcggacgatgcagtttggcaaaagttgacggaaaaacgaaaaaagacaaatggaaagttacatttgaacggcaaaaatgagtcgttttttcagtttttttctccatctgtgccgtatttgttttataatgtgaactagataaccgtactgaaatgtaaaaatggaggtggcaatatgccattaacgccgaatgatatccataacaaaacgtttacaaaaggttttcgcggatatgatgaagatgaagtaaatgaatttttaatgcaggtcagaaaagattacgaaatcgcactccgtaaaaaaacggagcttgaggcgaaagtgaacgagctggacgaaaaaatcggccactttgccaatatcgaagaaacgctgaataaatcaattctcgtagcccaggaagccgcagaagacgtaaagcgcaactcgcagaaagaagcgaagctgatcgtccgtgaagcagaaaaaaatgctgatcgcatcatcaatgagtcgctttccaaatcaagaaaaatcgcaatggaaatcgaagagctgaaaaaacagtctaaagtcttcagaacacgtttccaaatgctgattgaagcgcagctcgatctgctgaagaacgatgattgggatcatctgctggaatacgaagtcgacgcggtatttgaggaaaaagaataattttctgattttcttgacattctccggcccgttcgaatataatacgttcataaattcagatgaaaagacgattgaaagggaccggcatgactcaaaacaggctataaagcgacccggggaaggtgaaagcccgggatggccggaatcatgcagatcagccctttagtttcctttctgaaccgagagtaggaaaggacgttccatcacgttacgatgttcgagaggaaaagacggatgatccgttttttctaaaagggtggtaccgcgagataagctttctcgtcccttatgggatgagagggctttttttattttctgaaaaatgttgtggaggaatgaaaatggattacaaagatacgctgttaatgccgaaaacagattttccgatgcgcggaaatctgccaaatcgtgagccggacatgcaaaaagactgggaggagcaggacatttaccgtcttgttcaagaacggacgaaagaccgcccgaaattcgtgctgcatgacggacctccttatgcaaacggagacatccacatgggccatgccctgaacaaaatcctgaaagacttcatcgtccgctataaatcaatgagcggctacaacgcaccgtacgtgccgggctgggatacgcacggactgccgattgaaacggcgctgacgaaaaacaaaaaagtaaaccggaaagaaatgtccgtcgctgatttccgcaagctttgcgaagattatgcatggcagcagatcgaaagacagcgcgaacaattcaagcgtctcggcgtcagaggcgattgggaaaacccgtatgttacgcttcagcctgaatttgaagcgcagcagatccgcgttttcggcgagatggcgaaaagaggctatatttataaaggtctgaagccggtcaactggtcgccttccagtgaatctgccttagcagaagcggaaattgaatatcaggacaaacgttccgcgtctatttatgttgcgtttaaggtgaaagacggtaaaggcgttctggaaaacggagaaagcttcatcatctggacgacgacgccgtggacgatgcctgccaacctcggaatttccgttcatcctgatcttgaatacaatgtcatcaaggttggagacaagcgttatgtagtggcagctgaactgatcgaaaacgtagcggaggcatgcggctttgaaaatcccgaagttgtcgcatcatataaaggcagagaattagaatacatcactgcagaacatccgctgtacggcagagattcactcgtcatgctcggtgaccacgtcacaaccgatgccggaacaggctgtgttcatactgccccgggccacggggaagatgactttatcgtcggccaaaagtacggcttagaagtactgtgccctgttgatgaaaaaggaaacatgaccgacgaagcgccgggctttgaaggaatgttttacgataaagccaataaaccgatcacggagaagcttgaagaaaacggcgcgctcttgaaactcgagtttattacacactcctatccgcatgactggagaacgaaaaaaccgaccatcttcagagcgacagcgcaatggtttgcgtcaattaaagatttcagatccgatctgcttgatgccatcaaacaaacgaagtgggtgccggagtggggcgaacagcgcctttacaacatggtgcgcgaccgcggtgactggtgtatctcaagacagcgcgtctggggcgttccgatcccggtattttatgcagaaaacggtgagccgatcatcactgacgaaacgattgaacacgtgtctgagctgttcaaacagcacggctcaaacgtctggtttgaaagagaggcaaaagaccttctgccggaaggatttacacatccgggaagcccgaacggaatcttcacgaaagagcaagacattatggatgtgtggtttgattcaggttcttcccatcaggccgttcttgaagaacgtgatgatcttgtccgtccggctgatttataccttgaaggctctgaccaataccgtggctggtttaactcatctctttccaccgctgttgcagtcaccggcaaagcgccgtataaaggcgtattaagccacggatttacacttgatgcaaacggccgtaaaatgagtaaatcactcggcaatacgattgacccgacaaaaatcgcaaaacagcttggagctgaaattctgcgtttatgggtatcttccgtaaactatcaggccgatcacccggtttctgaagatattctgaagcaggtcgcggaagtataccggaaagtccgcaacacgttccgcttccttcacggcaacctgttcgatttcaatccaagcgtcaatgccgttgatgtaaaagatctccgcgaagtggatcaatatatgctgatcaagctgaataagctgatcgataaggtgaaaaaagcgtacgatgaatacgaatttgcggttgtttatcacagcattcacaatttctgtacgatcgagctcagctccttctatcttgattttgcaaaagatgttgtgtacatcgagcatgcggatcatccggaccgccgcagcatgcagaccgtcttttatgaaacgctgctggcgttagtgaagctgacggcgccgattctcccgcacacggcggatgaaatgtggtctcacttatcatttgttgaagaagcgagcgtgcagctgacagatatgccggaaaccattgctgttccggacagtcaagcgacagaagaaaagttcgaccgcttcatggagcttcgaaacgacgtgctgaaagctttggaaacagcccgtaacgaaaaaattatcggaagatcattggaagcgagcctgactttgtatccgaacaaagaaaaccgcgacctcttgtcatccattaaagaaaacatcgcgcagctgtttatcgtctcagaactgacagtaagagacgaaagtgaagcaccggaaaacgcgcaaagcttcacaacaggaaaaatgaccgtagaaaaagcggaaggccagatgtgtgaacgttcccgcgtaatttctaaagatgtcggagccaatccgaaatatccgacactatcactgcgcaatgcggaaatcgttgaaaaatattatcaaaaataatgaatgagaaagcgcccggtgtcagccgggcgcttttttacatgccactaatgtcatcgattagaacgacaggaaaaatcttatgggcttcaaatgacgctctgggggcaacaataaagccataacatcaagagcaggagttgtgatgaatgaatgatcaactgaccgcaatccacacggagcttctcatgatgaaagaagaacttcaatcaagattattcgaatattcttgctttcaaatgtcagcatctgttgaaccttcaatgaacgaccaagaagcaactctgatctatcatataaaagaagaacttcaggacgttcttcttgccctgtctaagtttgaaaacaatacgtacggttattgtgaaaaaacaggcgcccccattccgattgaaaaacttgcggtgctgccgacggccagaaccgctgatgatttttattatcccgctcaatttgaaaagaaaacccttccatattgggaacccggagattatgcatatgatcaggcgctgtatgaatgacagcgtctgtttgcatgcgcttatgatctgcctttactctggcatcttttactgataaaattcataaaggataaaagtaactgtatactggaggaacgtgtgtgctttattatctaatcgctctttttattattattgccgaccaattgaccaaatggcttgttgtcagccatatggaattgggacaaagcatacctgtcatcgatcaggtgctttatatcacatctcatcgcaacacgggagcggcgtgggggattttagccggccaaatgtggtttttctacgtcattaccatcgccgtgattatcggaatcgtttattacatacagcgttatgcaaaagggcagatgttactcggaatttctctcggcttaatgctgggcggtgcggccggaaactttattgaccgggcggcgcgccaggaagtggtggattttattcatgtcatcatcgtggattatcactatccgatttttaatatcgcggactcctcactgtgcgtcggtgtaatacttttatttattcatatgctgtttgacagcgggaaaaagaaggagcaataacatgaatcaatttgagataaccgttcagcctgaacaaaagagcgaacggattgataaatttttggcttcaacgggagaaaactggtcacgcactcaagtgcagcaatgggtaaaagagggactggtatccgttaacggcaaatccgtaaaagcgaattataaaatgcagcccggcgatcaggtaaacgtcaccattcctgaaccggaagaattggacgtgcttgcagagccgatggatttggacatttactatgaggatcaggacgtcttggttgtgaacaaaccgcggggcatggttgtacacccggcgcccggccatgtgacagggacgcttgtaaacggactgatggctcactgcaacgacctttccggcattaacggcgtcatgcgcccgggaatcgtccaccggattgataaagatacttccggtctgttaatggtcgctaaaaacgatatggcgcatgaatcactcgttaatcagctcgtcaataaaaccgtgaccagaaagtacaaagcggttgtccacggggtgatttcacatgatgacggaacaattgacgctccgatcggtagagataaaaaagaccgtcaaagcatgaccgtaacaagagaaagcagcaaaaacgccgtcacgcacttccacgtgcttgagcgttttcaagatttcacgctcgtagagtgccggcttgagaccggaagaacgcatcagatccgtgttcatatgaaatatatcgggtttcctttggcgggcgacccgaagtacggaccgagaaaaaccattgatttcaatggtcaggcgcttcatgccggaatattaggttttgatcatccgcggacgggcgaatacattgagtttgaagcgccccttcctgaagatatgaaaaaactcattgaagatttaagaaatagccattgacagcgactttcttttctgaaataataaaaacaagctgaatagattctttaatacagtccagagaggctgagaaggataacggataggacagaagagatacgcatgtgtcttcgtcctggaaaggaacccctctatgctctggcaggaggggttttttcttcttatatacgaatggagaggtgtcacgagtgaatcaaaaagctgttattctcgacgaacaggcgatcaggcgggcgctgacaaggatagctcatgaaatgatcgaacggaataaaggaatgaatgactgcattcttgtagggattaaaacaagaggcatttatttagcgaagcggctggccgagcggatcgaacagattgaaggaaatccggtcaccgtcggggaaatcgatatcaccctttaccgtgacgatctcacgaaaaaaacgagcaatgaagagccgcttgtaaaaggcgcggacattccggccgatattacagaccaaaaggtcattgtggttgatgatgtgctttataccggccggacggtgagagctgcgatggatgccctcgttgatgtcgggcggccgtcatcgatacagcttgccgtgcttgtcgacagagggcaccgggagctgccgatcagagcggactatatcgggaaaaacattccgacctcaaaagctgaaaaagtgatggttcagctgagcgaagttgatcagactgatatggtcgccatttacgaaaatgaataatcacctttttaaatgcattccagagagtttgcaaagaggattttaaaacacaaagccgggcggatcaacgcggccgggttttgtatgcctctttgcgcaaaaagcaaagaggtttttttataccatttgaaagtcaaccgggaggaaaacgccatgagtaagaaaaaagtaaacctgggagtcagggacgtccccaatccattgtcttggctgtcattcagcctgcagcatttattcgccatgttcggttcaaccatactcgtgccgaaactggtcggaatgagcccggcagtggcgcttgtcacgagcggaatcgggacactcgcctatctcttggtgacaaaaggccagattcccgcttatctcggctcatcattcgcctttatatcaccgattatcttggtgaaggcgacgggagggccgggggctgccatggtcggcgctttcctggcgggaattgtgtacggcctgatcgcgcttctcatcaggcagcttggaacggggtggttgatgaagctgctgcccccggtggtcgtcgggccggtcatcatcgtcatcggcctcggactggcaagcacagccgtcaatatggcaatgtatgccgatccgaatgcaaaggaactcgtctacagcttgaaacatttcagtgtagccggcgtcactttggccatcaccattatctgcgccatctttttacggggatttttaagcctgattccggtattgatcggcattataggcggctatctgtttgcgctgacacagggcatcgtcaatttccagccggtcattgatgcaaaatggttcgccgttcctgaatttatcatccctttcaaagactatacgccgtcagtgacgttgggcattgcggctgcgatggtgccggtcgctttcgtgacgatgtcagaacatatcggccatcaaatggtgctgagtaaagtcgtcggacaggatttcattaaaaagccgggactgcaccgctccataatgggggacagtgttgcgacgatcatcgcttcgttaatcggcggcccgccgacgacgacatacggcgagaacatcggtgtcctggcaattacgagagttttcagcgtctttgtcatcggcggcgcgggtgtgattgcgctgtgcttcggatttatcggaaaagtatcagcgctgatcagctctgttccgtccgcggttatgggaggcgtttccttcctgctcttcggaattatcgcctccagcggcttaagaatgctgattgacaacaacattgattatgaaaacaagagaaatttaattatcacatccgtcattctcgtgatcggtgtcggaggggcttttattcaagtatcaaaaggcgggttccaaatatccggcatggcgcttgcggcaatcgtcggagtcatcctgaaccttatcctgccgcatgcaaatgaagaagacgcgattgcatcagaaaaacaaaatcatatgtaaaaccttttaaagaaagtccagagaggcttggaagggttataacgggaagaagctgtacgctgcttctctctttaaccgcaccccgagtctatagaccggggtgtttttttacggccttcaagcggaaacggaggagaaaaacatgaatcatttaacggcgatgtctgaactgagcgcagctgaaattacagaactgctgcgtgaggcaaaagcgataaaagagggaacagtccgccccgatctcgcgggaaaatttgttgcgaatctgttttttgaaccgagcacgagaacgcggttcagctttgaagtggcggaaaagaaactcgggatgaacgtgctcagcttagacgatacgagcacaagcgttcaaaaaggcgagtccttatacgacacggtcaaaactctggaatcaatcggagcggacgcctgcgtcatcaggcacagcacggatgaatattacaaagatctgaccggcagagtcaatattccgatcttaaacgccggcgacggctgcggccagcacccgactcagtcattgctcgatttaatgacgattcaagaggaatttgagacctttcagggcctgacggtttccattcatggcgatatcaaacacagcagggtggcaaggtcaaatgccgaggtgctgacaaggctcggcgcacgcgtgctgttttctggtccgccgcaatggcaggatgagaaaaacgccttcggcacctgtgtacagacggatgaagccatacaagcttcagatgtcgtcatgctgctccgcatccaaaatgaaaggcatcagacagaagccgaccaaaaaggctacctggaagcatacgggctgaccgcaaagcgggcggagagcatgaagcggcatgccatcatcatgcatcccgcaccggtgaacagaggagtcgaaattgacacaacattagtggaatgcggaaaatcaagaatctttaaacaaatggaaaatggcgtgtatatcagaatggcagtcttaaaaagagcactgcaaaccaatgtgaaaaggggagaagcggcttatgtcttatctcattaggaacggctggatgttaaatgaacagggagaaaaagtggcacaggatatccgggtaacgggtgaattcatttcggaaaccgggcttctgacagcgaaagacggagaaacggtgatcgacgctgacggactgttcgtttcaccgggactcgtagaccttcatgttcacttcagagaaccgggcggcgagaaaaaagaaaccattgagacgggctctaaagccgcggcgcgaggcggctttaccacagtcgcagccatgccgaatacaagaccggtgccggatacgaaagagcagatggaatggctgcaaaaccggatcaaagaaacctcatctgtcagggttcttccttacgcatccattacgatcaggcaaaccggcgaagaaatgacagattttaaggcgcttcatgaagccggagcattcgccttcaccgatgacggcgtcggcgttcagacggccggaatgatgtatgaagccatgaaacgggcggcttcaatgaataaagcgattgtcgctcattgtgaggataactcacttatttacggagggagcgtgcatgaaggttctttttcaaaagcgaacggcctgaacggcataccttccatttgtgaagcggtacatatcgcccgtgacgtcctgctggcggaagcggcgggctgccattaccacgtgtgtcatatcagcacgaaagaatcggtcagagccgtaagagacgcaaaaaaagcgggaatttgcgtgacggcggaagtgtcgccgcaccacctgctgctttgtgacgaagatatcccgggacttgataccaattttaaaatgaatccgccgcttcgcagcaaagaggacagagaggcgctgattgaagggcttttagacggtacgattgatttcatcgccactgaccatgcgccgcatactgaagaagagaaaaacacggatatgaagcttgcgcctttcgggatcgtcggtttagaaacagcctttccgcttctgtacacacattttgtgaaaaacggggcgtggacgctgaagcagctggttgatttcatgacggtaaaaccttgcgaggcatttgatcttccgtacggaacgcttgcaccgggggcgccggctgacatcaccctgattgatctggaaaaagaagcagccattgacaaagatacatttttatctaaaggaaaaaatacgccattcaacaagatgaagtgcttcggttggcctgttgcaacgatggctgccggtaagcttgcatacgaagaagggagactcgtcaaatgaaaagaagactagtgctggaaaatggagcggtatttgagggtgaagcattcgggagcctggagcataccgcgggtgaagtcgtattcaacacgggaatgaccggttatcaggaaattttatcagacccttcttactgcgggcagatcgtgacgctgacgtatcctctgatcggcaactacggaattaacagagatgactttgaatccatcactccttttgtaaaagggctgatcgtaaaagaactgtgcgagctgccttccaactggcgttcggcttacacgcttgacgagtatttgaaaatgaaaaatatccccggcttacaagggattgacacgagaaagctcacaagaatgatccgcacggccggcgcattaaaaggaacgtttgcttcaagtgaggagaatgtcggagaggttcttgcaaggctgaaagaaacggaactgccgagaaatcaagtcgctcaagtatctgcgaaaacggcatatccgagtccgggccgcggcaaacgcatcgtactcgtcgatttcggtatgaagcatggcattttaagagagttaaacaaaagaaaatgcgatgtcatcgttgtgccgtacaatgtaacggcggaagaagtgcttcagctcaagccggacggcatcatgctttctaacggacccggagatccgaaagatgtgccggaagccattgaaatgataaaaggcatactcgggaaggtgccgttattcggaatctgcctcggccaccaattatttgcgctggcatccggagcggaaacggaaaaaatgaaattcggacacaggggttccaatcatccggttaaagagcttgcgacagggaaagtcgctttaaccgcccaaaaccacggatatacagtttcttcaatagatgaaacagagcttgaagtgacgcacattgcgatcaatgatcaaacgatcgaaggactcaagcataaaacattgccggcatttacggttcagtaccaccctgaagcttcaccgggaccggaagacgccaatcatttatttgacagattcattgacttgatcgaaacaactgagaaagaaggggaagcggtatgccaaaacgcgtagatattaaaaagattttagtgatcggatcaggcccgattattatcggacaggcggcggaatttgattatgcgggcacacaggcgtgtctcgctttaaaggaagaaggctatgaagtcattctcgtcaactcgaatccggcaacgattatgacggatacagaaatggctgatcgggtatacatagaaccgctgacgccggagtttctcacgcgtattatcagaaaagaacggccggacgccatcctgccgactctgggaggacagaccggactgaatcttgccgtcgagctgtctgaactcggggttcttgaggaatgcggggtggaagtgctcggcacaaagctgtccgccatccagcaggcggaagaccgcgacttattccgtacgctgatgaatgagctgaatgaaccggtgccggaaagtgagatcatccgcactttacaggaagccgaggaatttgtcggccggatcgggtttccggttatcgtgcgccccgcttacacattaggcggaacgggcggcggcatctgctcgaatgaagcagaactgaaagagatcgtcgaaaacggattaaaactcagccccgtccatcagtgccttctggaaaaaagcattgccggttacaaagagatcgaatatgaagtcatgagagacagcagagatcacgcgatcgtcgtctgcaacatggaaaatatcgatccggtcggcatccatacgggtgacagcatcgtcgttgccccgagccagactttgagcgaccgggaatatcagcttttgcgcaatgtttcattaaagctgatccgcgcgctcggcattgaaggcggctgtaatgttcagctcgcgctcgatcccgacagcttccaatattacattatcgaagtgaatccgagggtgagccgctcatctgccctcgcctcaaaagcgacgggttacccgatcgcaaagcttgcggcgaaaatcgcagtcgggctttctcttgatgaaatgatgaatcccgtaacgggaaaaacatatgcggcttttgagcccgcgcttgactatgtcgtttctaaaatcccgcgctggccgttcgacaaatttgagtcggcaaaccgcaggctcgggacgcaaatgaaagccaccggagaggtcatggccatcggacgcacccttgaagaatcgctgttaaaggcggtccgctcattggaagccgatgtctatcacctggaactgaaggatgcggaagagatttctgacgggcttttggaaaaacggatcagaaaggccggggatgaacgcttgttttatcttgctgaagcgttcagaagaggctatacagtggagcagcttcatgaattttccgcaattgacgtattctttttgcacaagctctgtaagctggtcgcttttgaaacagagctgaaagcggaaaaaggcagcctcgccgtccttcagacagcgaaggaactcggtttctccgacaaatatatcagccgggaatggaatatgccggaacaagagctgtatcaaatgcgaaaagaagcagacatcaagcctgtatataaaatggtggatacatgtgcggcggaattcgaatcagaaaccccgtacttttacagcacatatgaggaagagaacgagtctgaggttacatcaagaaaaagcgtcgtcgtcctcggttccggcccgatccgtatcggacagggcgtcgaatttgactatgcgaccgttcattctgtctgggcgatcaagcaggcaggctatgaagcgattattatcaacaacaaccctgagacggtgtccactgatttcagcatatcagacaaactgtattttgaaccgctgacggtagaagatgtcatgcacatcatcgatttggaacagccggaaggcgttgtcgtccaattcggcggccagacggcgatcaatcttgcggaagaattgagcgcccgcggcgtcaaaatcctcggcacatcacttgaagatttagaccgtgcggaagaccgggataagtttgagcaggcgcttgaggcgctgaatgtgccgcagccgctcggaaaaaccgccgtgtcggtgaacgaagcggtcaaaattgccgcatccatcggctatccggtacttgtccgcccttcgtatgtgcttggcggccgggcgatggaaatcgtctatcacgaagaagagctgcttcactatatgaaaaatgcggtcaaaatcaacccgcagcatccggtgttaatcgaccgttatctgacggggaaagaaatcgaagtcgatgccgtatctgacggcgaaacagtcgttattccgggaattatggagcatatcgagcgggccggcgtccattcaggggattcaatcgccgtctatccgcctcagtctttaagcgaagacattaagaaaaaaatcgaacaatacactgtagccttggcaaaaggccttaacatcatcgggttgctgaacatccagttcgtactgtcgcaaggtgaagtgtatgtgcttgaggtaaatccgcggtcaagcagaaccgtgccgttcttaagcaaaatcacaaagattccgatggcgaatctggcgacaaaggtcattctcggccaaaagcttgctgatttcggctatcaagaggggctgcagcctgaacagcagggggtgttcgtgaaagcgcctgtcttctcattcgcgaagctgagaagagtagatattacgttaggccctgaaatgaagtcgacgggagaggtcatgggcaaagattcaaccctggaaaaagcgctctataaagcgctgattgcttctggcattcaaatcccgaactacggctcagtgctgttgactgttgccgataaagataaagaagaaggactgctgatcgcgaagcggttccacgccatcggctataaaatcttggcgacggaaggaacggcggcttatttgaaagacgctcagattccggctcaagtcgtcgggaaaatcggcgaagaagggaaaaatctgctcgatgtgatcagaaacggcgaagcgcaatttgtcatcaatacgctgacaaagggcaaacagccggccagagacggcttcagaatccgccgcgaatccgttgagaacggagtcgcctgcctgacatctttagatacggccgaagccattttgcgggtattggaaagcatgacattccgggcggatcatatgcctgcatccgaaaccaatcaaaaggcggcagccacgatatgaaaaaagcgcatttgactgttcaatccaacttagaaattgccgaccggatttataagatggtgctgaaaggagagcttgtccggcaccttaccgagccgggtcaatttctacatctgaaggtgagtgacgcggtcacgccgctattaagaagaccgctcagcattgcggacgtcgatttcgccgcgaatgaagtatccgttatctacagagctgacggtgagggaacgcgtcttttgtccgagaaaaaagagggcgacaggatagacgttctcggccctctcggcaacggattccccgtccggcggattgaacccggcaaaaccgcgctgttagtcggaggcggagtgggggttccgcctttgcaggaactgtcaaagcgcctgacggaaaaaggagtaaacgtcattcatgtgcttggatttcaatcagcaaaggatgttttttacgaacaggaatgtcgtgcgtacggagacacctatgtggcgacggctgacggcacatatggagagaaagggtttgtcaccgatgtcatccgtgaaaagcagctcgaattcgatgtcctgctaagctgcggaccgacaccgatgctgaaagctctgaagcagcagtacggccataaagaggtttatctttcgatggaagagcggatgggctgcggcatcggagcctgcttcgcctgcgtgtgccgcacgggtgaaagcgatacatcctatgtaaaggtctgccttgacgggccggtatttaaagctgaggaggtggcgctgtaatgttagaggtgaatctgccgggtctccaattgaaaaacccgatcatccccgcttccggatgtttcggtttcgggaaagaatatgccggattttacgatttatcatgcctcggaggcattatgattaaagcaacgacgaacgaagcccgcttcggaaatccgacgccgagagtggcggagacaagcgcgggaatgctgaatgccatcggtctgcaaaatcccggccttgagcatgtgctcaatcatgagctgccttggctcgaacaatttgacacgccgattatcgcaaatgtcgccggttctcaggtggacgactataaagaagtggccgagcacatcagccaagcgccgaatgtgcatgcgcttgagcttaacatttcatgtccgaatgtcaaaacgggggggattgcttttggtactgatcccgtcatggcggccgaactgacaaaagcggtgaaagaagtttccgcagtgcctgtgtatgtgaagctttcgcctaatgtcgcaaacataaccgaaattgccaaagcgattgaagcggccggtgctgacggtctgacgatgattaatacactcatcgggatgaggctcgatctcaagacgggacggccgatcttagcaaataaaacgggcggactgtcaggcccggcgatcaaaccggtcgccatccggatggtatacgaagtcagccaggccgttcaaatcccgattatcgggatgggcggcgttcagaccgcagaggatgcattagaatttcttcttgcgggagcgagtgcggttgccgtcggcacggcaaacttcgtcaatccgttcgtctgcccggaaatcatagaacagctccccagtgtactgcgccaacacggctttcaatctgtaagtgaatgcatcggaaggagctggaaacatgaaaaacaacctgcccatcatcgcgcttgattttgcatcaggggaagagactttaacgtttttagacttgtttgaaaaggaaaggctttttgtcaaaacggggatggaacttttttatcaggaaggccccgccatcattcaccaattaaaagaacggaactgtgatatatttttagatttaaagcttcatgatatcccgactacggtcaataaagcgatgaagcggctggccggcctcggcgttgatctcgtcaatgtgcatgcggcagggggcgcacgcatgatgcgcgcggcccttgagggacttgaagaaggcacgccggcaggcagaaaacgcccgtctttaatcgcggtgactcagctgaccagcacttcagagcaggtggcgaaggaagagcttctgctgcataagccgctgttagaaacggtcgtgcattacggcaaaatggcggaagagtgcgggctggacggagtggtatgttcggtgcatgaaacaaaagccatttatgaagcggtccggccttcatttctgacagtcacaccgggcatccgcacggccagtgacgcagctgacgatcaagtccggacggcgactccgtcatttgcgaaaaaaaacggttcgtcagccatcgtcgtgggccgctcaattacaaaagcggaaaaccccgttgaagcatatgaagcaattaaactggaatgggagggcgttcgccgatgaaacaggctatcgcaaaacatctattacacattgaagctgtctttttacgcccgaatgacccgtttacgtgggcgagcggcattttatcaccgatctattgtgacaaccgtctgacattgtcgtatccaaaagtgagaaatgatgtggcggacgggctcggcaaactgctgaaagagcatttccccgaggcggagatgatcgcgggcactgcaacggcgggcattccgcatgctgcgcttctcgcagaccatacaggcgcgccgatgtgctacgtcagaagcaaaccgaaagcgcacggcaaaggaaatcaaatagaaggcgccattaagaaaggacaaaaaacagtcgtgattgaagacttgatttctaccgggggcagcgtgcttgaagctgcagcggcccttcaaagagagggcgcggaagtcctcggcgtcatttccatttttacatacggactgccgaaagcaaaagaagcctttaaaaaagcgggtcttccttattactcgttaacggattatgacacgctgattgaagtcgcgcttgaaaacggtacgattcattcagatgacattgagaaactgaaatcatggaaacagaatcccgagtcaaaagattggtttaaaaaataatgacaataaaaacaggcctcagggcctgttttattattcctatcaaaaaactcgggttgacttctgttagaattgtgctaaaatttagtacaaatctaaaaagcttatcaagagcggctgagggactggaccgatgacgcccggcaacctgcgtgtcatgcaaggtgccgcatccagaaaaatgcacagcattttgaagataagggctataccgggtcactgtctttcattccgctggattgaaagttttttatatgaaaaaaagattgagggataagacaaccggcagaaaacaacagctgtttgattgtctccgggaggaggaaaggaaaaatgctaacgtatgacacatgggaagagccggcgattacatttccggaagacgattcctataaaggcgcgctgtccgttttaaaatgggcatacggccactacggagaccagcttgtttacgcgtgcagcttcgggattgaaggcatcgtcctgatcgatttaatttctaaagtaaagaaagacgcggaaatcgtgtttctcgatacgggtcttcactttaaagaaacatatgaaacgatcgaaaaagtgaaagagcgttacccgggactgaacattatcctgaaaaagcccagccttactcttgaagaacaggccgaggctcacggagataaactgtgggaaagagaaccgaaccagtgctgctacatcagaaaaattctgccgttaagagaagcgctcgcggggcatccggcatggctgtccggccttcgccgggatcaagggccgagccgggcgaatacgaatttcctgaataaagacgacaagtttcaatcgattaaagtatgcccgctgatccattggacatggaaagacatctggagatatacttccaagcatgagctggattacaatatcctccacgatcaggggtatcctagcatcggctgtgaaccgtgcacttcacctgcgtttaccgcggaagatttgcggagcggcagatggaacggcatggcgaaaacagaatgcggactgcatgaataaaggagctgcacgatggaattagccgctattttattctgcctgttttttgccatgaatatcggagcaagcggagccgcggcttcaatgggagtcgcttatgggtccggcgccgttaaaaagaaaacgtatgcgctgatcatctgcgcggccggagtcctgtcaggggcggttatcggcggcggtgaagtcgttaagacgatcagcggcggaatcattcccgaacaaaccattacgctcaccattgtctgcattattatcggatcggcggcgctatcattattcacggcgaatgtgctcggcattccgctgtcgacgagtgaggtcactgtcggggcgattgtcggtgtcggcgtcgcgtacagagtattgtttttacagcatcttttggtcatcgtgattttttgggtgcttgtaccgtttgtcgcgttctgtttcacgtttctcgtctcgaaggtattcagttctctgaatattcgagtcatttcgagtcggaaacagaagattttggggattgtgctgctgattgcggggttttgggaagctttttcagccggaatgaacaatgtcgcaaatgcggtgggccctttggttgctgcgggcgtgctcagcgtgtccaaaggaacgctgtacggaggcatctttgtcgctctcggcgctctgcttttaggacgcaaagtgcttgaaaccaacgggaaaaagattacgagattttcagccggagaaggcatactgctttcaggaaccggcgcggggcttgtcattatcagttccgtcttcggtctgccggtcccattggcgcaagtcacatcatcatcaattatcggtatcggaatggccaaaaacgggccgaacgtttttcataaagaagtcgtgaaaacgatgctcaaagtatgggtcgtttcaccgtttttgtcactgtcgatttcgtatttgcttgtctccctgctgttaaaaggagattactattccatctttatgatggccagcgtgcttttggcagctggcggagccgccagtctgatgaaagccatccgaaaagagaaacgctctgtccatgaacaaggcggaggcatttaactattaatctgagtttatttatctgttaactgggaggaatcatgtattatgagtttagcaccgcacggaggaacattaattaatcgggtaaatgagcagtatgatcttacatccgtccaaaaagaaattgagcttgatttgatttcgttcgctgatttagagctgatcgggatcggggggtacagcccgattgaaggatttttcacagaaaaagattacgtgtcagtcgttgaaaatatgcgtctggcatccggggttgtctggtccctgccgatcacgcttccggtcgattcagaaaaagcggctgagcttgccgtcggcgacacggtgaaactgacttacggcggagaaacatacggcgtagtcgacatcgaagatatttatacgccggataaacaaaaagaagccgttcacgtatataaaaccgatgatgccgcgcatccgggcgtgaaaaaattattttcacgcggcgatacgtatgtcggcgggccgatcacattagttaaaaaagcgtcaaagcagtttcccgagtttacatttgaacctgccgatacaagacgaagcttcgaagaaaagggctggaaaaccattgtcggtttccaaacgagaaatccggtccaccgcgcccacgaatatatccaaaaaaccgcgcttgagacggttgacggcctgtttttgaacccgctcgtcggtgaaacaaaatcagatgacattccggcggatgtcagaatggaaagctaccaggtgctgctcgatcattattatccgaaagaccgcgtgttcctcggcgtgtttttggcggctatgcggtatgcggggccgagagaagccattttccacgcgcttgtccgcaaaaactacggctgcacgcattttatcgtcggccgcgatcatgccggcgtcggtgattactacggcacatatgaagcgcaagagctgtttgatcaatttacagcggatgaactcgggattacaccgatgaaattcgagcacagcttcttctgccagaaatgcggcaacatgggaacggccaaaacatgcccgcatgacagagaagaccacgtcattctgtcaggaacaaaggtcagagaaatgctgcgaagcggcgtcatgccgccggcggaattcagccgtcctgaagttgtcgaggtgttgattaaagggctgaaaacgaaagaagaagcaggcgtttcttaaggaggaaaatagagtgacaaatcgtgatatcgtgtggcatgaagcctcaataacgaaagaagaataccagcagaaaaacaagcataaaagctctatcctctggctgacgggcttaagcggttcagggaaatccacgattgcaaacgccgcagcgcgcgagctgtttgaacaaggctatcaagtcatcgtgcttgatggtgataacatccgccacggcttaaacaaggacttgggtttttccgatgatgaccgcaaggaaaatatacgccgcatcggggaagtggcgaagcttttcgttcagcagggaaccatcgtcatcacggcttttatttctccgttccgtgaggacagagatcaggtgagagagcttgtggcggagggcgaatttaatgaaatctatgttaaatgcgacctcgatatatgtgaaaagcgcgatccgaaaggtttatataaaaaagcaagaaatggtgaaattccgttctttacggggatcgactcaccgtatgaagagccgaaagcgcctgagctcgtacttgattcaggcaaatgtgaacgcgaagaatgcaccggaagactggttgactttgtgaaaaacagcttagcataataggtccaaaaaggccgcgcaatcagccggatatcccccgaaatggcgggatatggtaaaatagctgaagtgcggcctcgcggctgttctgggaagatttcaaaacggatcggggagacatgctatggggaaagtatttatcgttggagccggtccgggagatccggacttattaacggtgaaggcaatgaaagccatacagaaagcggacgttatattatatgacagattggtaagcaaagagattttacaatatgccggagaagaagcggatctgatttactgcggaaagctcccggattttcacattatgaaacaggatacgatcaaccgtttccttgtgaagtatgcgaaaaaggggaaaaccgttgtaaggctcaagggaggcgacccgtttgttttcggccgcggaggcgaagaagcggaggctctcgcacaaaacgccattccgtttgagatcgttcccggcattacatcaggaatcgcggcggctgcttatgccggcattcccgtgacgcacagagaggcgagctccaatgtcgcattcgttacgggacattataaacaagaagacgactttgaagaaaaatggaaagcgctggcgacgggcattgatacgctggtgatttatatgggaattaaaaatatccggcagattgaaagaatgctgctggaaaacggcagagacgccggcaccccggcagcctttattcattggggaacgacggacaggcaaaaaacagtcgtctgcaccgtcggcacgctttcagacacagtgataaaagaagaaatcaaaaacccgagcttaattgttatcggcgatgttgtcaattatcactgcaaactggactggtatgcatctgaacagaaaaatctggatttgagcgaggcgttgtaaatgaagcaggcgattttatacatcgggcacggaagcaggctgaaaaaagcgcagacagagtcggcggcgtttttaaaagggtgcatgccgcacgctgacgctcccattcaggaaatttgttttttagaactgcaggaaccgtctattgaagcgggatttgaagcgtgtgtcagacaaggcgccactcatattgcggccgtgcctttactgctgttgaccgctgcccacgcaaaacatgacattccggctgaaatcgcccgtgcggcggccctgcatcccgatataaaagtgacatatggtgttccgatcggagtggacgatgaagtcgtaaaagcggtgcatcatcgcattgaagataccggagtgcccattgagcaggcgaaagtggtgctgatcggaagaggaagcacagatccggcagttaaaaacgcagtcagtgagattgccggaaaacttgaggcgattacacctgttaaagaagtcatcccttgttttttaacagcatgtgacccgcactataaagaagtgtttgccggccttgaagaggatgacggagcacccgtttttatcgttccatatcttctgtttaccgggcttttaatgactgagattgaacgggaagttcaaaagcttcaaacgatcaatcaaaatgttcatctcgcttcatacttaggttttcacccgcatattaagcaggcgtttttgaaccgtgtgtcagaagctgttcgaaaccccggcggtcagtttgattttaaggggggacagtatgctgcctatgcacattaatttaagcggaaaaagaattatcatcgcgggcggaggcaatgttgccttaagaaggctaaaaacggtgcttccggaaggcgcggatattactgtaatcagtcccgatgccctgcccgaaattaaacagctggcggatgaaggacgtatccgctgggtttcccgtaaaattgaaatgaaggatctcgcgcccgctttcttcatcattgccgcgacaaatgaccgcagcgtaaatcaggagatagccgcgagcgcttctgaaacgcagctggtcaattgtgtaagcgatgctgaacagggcagcgtgtatatgccgaagatcatccgcaaagggcgcattcaagtatccgtatcaacaagcggcgcaagcccggcacatacgaaaagactggctgaggacatagagcctctcattactgctgatttggctgaagaagtggatcgattatttgagaaaagaagaagaccataaaaaacaccttgtctgtcatcaggcagggtgttttttatactgtcctcacagtccccgaatgtgaacaattcaaaacgaaagcgggcagtttgaacggtatatgccgacaagcggtcaggattgcgaagtgatgcggaatatctatctgatcccaatgccgcctggattccgcccgcatacaaagaaaaggtcagagacccggcatgattatattgactgcccggatgtgttcaggtttggcgagggaaggtgacagtatccgccgccaaatcaggtgtgaccgctttaatcagagacggcccccggcggatcaggcagacatgacgggaaactgatcagatactgtatagatggttctgacggctgggagagtgtcgtctccgtttataagtaataaaaaacacctccaagctgagtgcgggtttcagcttggaggtgcgtttattttttcagccgtatgacaaggtcggcatcaggtgtgacaaatacggtgtgctggctgtcataggtgacaaatccgggctttgcgccgtttggctttttcacgtgtctgatttttgtataatcaacgggaacggagccggaatctttcgctttggaaaaataagcggcgatcgcagccgcctccagtatggattgttcatccggatcgctgcttttaatcacaacgtgggaacccggaatgtctttcgtgtggaaccataaatcatcccttgcggcagcttttgtcgttaagtattcattttgtttattgtttttgccgacaagaatcgtcaatccccgtgaagattcatattgctccaaaacaggaacgtgctgcttctgttttttctgtcctcgctgctgtttcggtcgcagatatttgccttccacaagctcttcccttatttcgtgaatatcctttgtggaggcggaggagagctgctggatcagctgatcgaaataagcgatttcctcctcggccagacggatctgttcttttaccacctcgacggaattcttcgccttttggtactttgtaaaatacatctgcgcgttttctgacggtgttttgttcggatttaaagggatggtcaccgtcttactttcttcatcataataattgatgacttccgcttctttgtcaccttttttcagcatatacaaatttgccgtcagcagttcgccgtatagctggaattccttcgcattctctgagtagtcgagcgtcttttccagcttttttatcttattggcgttctttttccgttcatttgcgacaaaccgctcaagatcctgagcctgctgtttgacgcggtcgcgttccgccttgccgaaataaaaccggtccaacagctcactcagtgagtgaaaggtgcgctcctctccgtttacatgtgtgagagacaggagataaaagtattcctttccgccggctgtcgtaatgttcggtgtaaacctgcaatctttcacggcatggaacatttcaatcagcgtcttcggcagcgttattttgttagcgaggcccgctctgtgcacggcttcttttgcaaacagcggagaaacaccggagaaatgtctgacgatctgctggtcaagccgtccttcctgaaaactgagataacgcaaaacgtcctcttcatccgcggcaagcggcgaaattttttcctgagcgggaggaagcttgtaatcatagcccggcagaacggtccggtagctgttcatcgacggagatagatgtttcagcccgtcgatgatggctccttctccgtcagtcagaataatattgctgtgccgccccataatttcaacatacagcgttctgacggtttcgtcgccgatttcatttctgctttttatgcggaatatcataatccggtctaatccggcctgttctattttctcaataaatccgccttcgatatgctttctgagcagcatacaaaacatcggcggctcgctcggattttcataggcctggtttgtcatgtgcacccgtgaatagctcggatgcgccgataataataatttatggttttttccgttagcgcggatatgaaatatcacatcgtgcttaaaaggctgatggactctcgtaatccggcctccggcgatccggctgtttaattcatgtgtcattccgtatgtaaacatgccatcaaaagacatataaaacaccctttccttcttcctgcattcgataattatagcatgaaaagggacgagtcagaataagcttgtttacagagtgacatctctaaagcgaggcaggggagtggacgagaagaatgaagtttcatgaaatgggacaaaccgatttgctgaaagcaacaaatacgtccattaaacaggggttgaccgaaaaagaggtgaaaaaacgccttgaaaagcacgggccgaacgagcttcaggagggcaagaggacaccggcgatcgccgtgtttttcgcccaatttaaagattttatggtgctcgtgctgctggcggcaaccttaatatccgggtttttaggcgaatatgtagatgccgtagcgattatggcgattgtatttgtcaatggggttctcggtttttttcaagagcggcgggcggaaaagtctttacatgcattaaaagagctgtcaacgccgtatgtgtcagcgttgcgggacgggagctggaagaaaattcagtccaaggagctcgttcccggcgatatcatgaaattttcaagcggcgaccggattggcgcggatgtgcggatcgttgaagcgaaaagccttgaaattgaggaatcggcgctgaccggggaatcaattccggtggttaaacaagctgataaactgagaaagccggatgtttcgttaggcgacatcagcaatatggcgtttatgggtacgatcgtaacgcgcggcagcggtgtcggcgtcgtcgtcggtacaggaatgaatacggcaatgggcaaaatcgccgatatgctggaatccgccggcagcctttcaacaccgctgcagcgaagacttgaagagctcggcaaaattttaattatcgtcgcgctcattttaacggtattggtcgttgcagtcggcgtcttacagggacatgatctttacagcatgtttttggccggggtgtcattggccgtcgccgcgattccggaggggcttcccgccattgttacggtggcattatcaatcggcgtccagcgcatgatcaaacaaaaatcaattgtcagaaagctcccggcggttgaaacattgggctgcgcctctgtcatttgttctgataaaaccggcacgctgacacaaaacaaaatgaccgtcacccatatgtggtcaggcggcaaaatttataaagtgtcaggcatcggctatgagccggagggcgttttcacccgagatgagcgggaaatcaagccgaaagatgagaaaattcttgaacagatgctggttttcggcgcgttgtgcaacacatccgaaatcgcactgaaagacggccgttatgtactcgacggtgatccgacagaaggagcgctgctgacggctgcaagaaagggcggttattcaaacgattggctcagcgggcattaccgcgtggttgccgagtttccgtttgactccgtccgcaaaatgatgaccgtcattgtagaggatcaggaaaaaaagcagttcgtcatcactaaaggagcgcccgatgtgctgattgaccgctcgtcacatctgatgcacggcgcaagaagtacgcctttttcaggagaaaagaaatcagaaacggaagcggttctgaaagagctggcgtcgcaagctttgcgtacgatcgcgattgcttataaaccgcttaagctcggagaaaagccgacaatggagcaggcggaaaaaaatctgacgatgctcggcttgtcaggcatgattgatccgccccgtccggaggtcagacaggcgattaaagaatgccgtgaggccggcattaaaacggttatgatcacaggggatcacgtcgaaacggcaaaggccattgcaaaagatttgcgtcttcttccgaaaaaggggcgtgtgatggacggcaagacgctgaatgagcttacggacaaagaacttatcgaaacggtcgatgatgtctacgtcttcgcacgcgtgtcgcctgaacataaattgaaaatcgtcaaagcgttccaggaaaacggacacgtcgtcgccatgacgggagacggggttaatgacgcgccggccataaagcaggcagatatcggcgttgccatgggcgtgacgggaacggatgtggcaaaggaagcctcttccctcattctggtagatgataactttgctacgattaaatcagccataaaagagggacggaatatctatgaaaatataagaaaattcgtccggtatttgctcgcctccaacgtcggtgaaattttagtgatgctgtttgcgatgcttctcgctctgccgctgccgctcgttccgattcagatattgtgggtgaacttagtcactgacgggctgccggcgatggccctcggtatggatcagccggaaggagacctgatgaggcggaagccgcggcatccgaaagaaggagtgtttgcgagaaaactgggctggaaagtcgtatcaagagggtttttaatcggagctgcaaccattttagcgtttatcatcgtctatcaccgcaatcctgaaaatctgccctacgcacagaccgttgcattcgcgactcttgtcctggctcagcttatacacgtgtttgactgccggagcgaaacgtctgttttctcccggaatccgtttgaaaatatctatctgctcggggccatcatttcttctatcttcctgatggtcatcgtcatctattatccgccgctgcagccgattttcaaaacagtgccgattacgccgggcgattggatgctgattatcggtatgtcgggcatacctacttttttgctggcgggttcacttttgacaagaaaaaaataattccatatgatataatcttaggggtaatagcatgtctattgcccttttattttgataacgggaaagaattgggtgtttcatatgatacggagtatgacaggcttcggcagcgcaagcagcacaaaaggcgatctctcggcaaccgttgaattgaaatccgtcaattaccggttcaaagaagtgaacgcccgcctgccacggcctttgctatatgtagaggataagctgaaacaaacgatattgcagcatatacagcgcggaagagtagagctgtttctcactgtaaacagtgacgcgctcataaaaagaagcctgaacatcgattgggagctccttgatgaatatgtgagcgccgcacgcgtcatgaaagagcgctacagcctggccgcagaacccgatgcaatggatttctttaaatttgaacatattgcgcagatacacgaagaacagatgcgtgatgacaagcttgaagaagtcatcagggaagccgctgagctggctgtaaaggaactttgtgacatgagggaaaaagaaggacggcttttggcggaagactgctttctgcacatcgagcggcttgagacgctgtccgaacaggtgaaagagcgcgcttcggccgttgttattcaataccgcgagcgtctttacgcccgaatgaaggaatggacggaggatgcgctcgacgaaagcaggctgatcacggaatgcgccattttcgccgatcgttctgatataacggaagaaattaccaggttgaagagccattttgttcaattccgtgatatattaaaagaaggcggggcagtcggccgcaaacttgatttccttgttcaggagcttaaccgagaagcgaatacgatcggctcaaaagccaatgatcatcaaatcacaaagcttgtcgttgaaatgaaaagttctattgaaaaattgaaggaacaagtgcaaaatatagaatagcgactgtgcgtattgtttacagacggcctcttcaggttacactagagacgtctattttacagggggaacgtagaagatgacgattaaactgattaatatcggatttggcaatatcatctccgccaatcggatgatttcgattgtcagcccggagtctgcgccaataaagcgaatgatccaggatgcaagagaccgcggaatgctaatagacgctacatacggacgaagaacccgtgcagttgtcgtcatggatagtgatcacattatcttatctgccgtccagcctgagacagttgcacacagactttctgtgaaagaagaaattatggatgaagggcaggggtaattgccgcatgaaagaaagagggttattaatcgttctctcaggtccctccggagttggaaaaggaacggttcggcaagcaatattttcacaacaggacacgaaatttgaatactcaatttcagtcacgacgagaaacccgagagagggcgaggtcgacggcgtcgattatttctttaaatccagagatgaattcgaacgcatgattgaaaacaacaaactgcttgagtgggcagaatatgtcggcaactattacggaacgcccgttgattatgtcgaacagacgcttcaagaaggaaaagacgtcttcttagagattgaagtgcagggcgcgctccaagtgcggaatgcatttccggaaggcctgtttatcttcttagcgccgccgagtctttctgagctgaaaaacagaatcgtgacaagagggactgaaaccgacgatttaatcgaaaacagaatgaatgccgcaaaagctgaaatcgaaatgatggacgcgtatgattatgtcgttgaaaacgacgatatccaaacggcttgtgataagattaacgcaatcgttctcgccgagcacttaaaacgtgaacgcgtcgctccgagatataagaaaatgctggaggtagaataacttatgttagatccgtcaattgactctttaatgaataaattagattctaaatatacgctggtgaccgtgtctgcaagacgcgcgcgtgaaatgcagatcaaaaaagaccagcagattgaacataccatttctcacaaatatgtaggcaaagctttagaagaaattgacgcgggcctgctttcgtttgaaagagaagacagcgaataacaagcacacgtagcaacctatctctacataggttgttatttttttccgtttgggatttgtccaatgctttcataaaggggagaagacttcatgaaaaaccgaaacattttgctatgcgtaagcggaggaattgccgtttataaagcttccgcactcacgagcaagctggttcaggccggcgcaaacgtcaaagtgattatgactgagtccgcgcgtgagtttgtttctccgctgacatttcaggcgctgagccggaatgaagtatatacagatacatttaatgaacaaaatccgaaggtgatatctcatattgatgccgctgactgggcggatttaattattgtcgcgcccgctacggcaaatatcatcggcaagcttgccaacggaattgctgacgatatgctcacaacgacggtgctggcggctgaggccccggtttgggtggcgcctgcgatgaatgtccatatgtatgatcatccggcggtgaaacggaacatctctgtgctttatcaggacggggtccgctttatcgagccgagtgaaggctatttggcatgcggatatgtcggcaaaggaaggctggaggagccggagcttattgttgagcgtgtcagagagcattttaaggagcctgaagacgatgcgccgctgaaaggaaaacatattgtcattacggccggtccgacgcgcgaagccgtggaccctgtccgcttcttcacaaataaatccaccggcaaaatgggctacgccgctgctgaagccgccgtctgtctcggggcgcgggtgacgctgatttcaggcccggtgtcaatagagccaccagtcgggctgtatcagtttcttcctgtgcaatcggcagctgatatgagagaagcggtgctttctgtgtttgattcatgcgacatggtgattaagacggcggccgtggccgattttacgccagcggctgtttctgatcacaaaatgaagaagaaagacggttcgctcgtgatcgaattcaaccgtacggcagacatactgaaagaactcggcgaacggaaaacacaccagctgctggtcggatttgcggctgaaacgcaagacgtcgaacgctatgcgcgcagaaaacttgaacagaaaaaccttgatatgatcgttgcaaatgatgtgaaagcagaaggggccggatttggcacggatacgaatgtcgtcaccttctatttccgggacggaagaaaacgggagcttgcgcttatgtctaaacttgacgtttcctttgaaatgctgaaggaaatgaccgctttgaaagccgaggaccgaaaacccgtatgaatgtagcagaagtcattgtcgatgtcagctccaaaaacattgacagaccctttgattacaaaattcccgatcatttaaaagggatgatcgaagtcggcatgcgggtgattgtcccgtttggcccgcgcaagcttcaaggatttgtgaccggtttgaaagattcgtctgaattaaacggcggctcaatgaaggaagtcgagaagcttcttgatttgacgcccgttctgactgaggaactgatgctgctgtcttcatggctttctgacaaaacgctgtcgtttaaaatcacggcgcttcaggcaatgctgcccgccgcactgaaggcgaagtacgagaaagagctgaaagtcgttgacgaagaagcgctgacaccggacatcaaacagcttttcaggaatcaaaaaagtcttctgtactcggatattaccgatgaaagcattctttcgtcacttcaaaaattcgtgcgcaaaggaagcattgatgtcacatataaagtcgcccaaaaaacgaataaaaaaatgatccgcatgatcgaagcgggggcagacaaagaagaactcgcccggcacgcagattcattgacaaagcaggcttctaaacagctcgccgtgcttacttattttatcggcgggggagcaaagatttccgcggccgaactttgcaaaaagaccgattccagttccgcgacgctgaaaacgcttcttaaaaaggggcttcttacggaaagctttgaggaggtttaccgcgatccttatcaggacagaatgttcaaaaaaacagagccgctctctcttacagaagagcagcgggccgcttttgagccgattaaacaagctgtagccgatcatgtccatcacgtctttctgcttcacggcgtcacgggaagcggcaaaacggaaatttacctgcaatccattgaaaaagtgctggcaaaaggacaagaagccatcgtgctcgttccggaaatctcgttgacaccgcaaatggtcaaccgttttaaaggccgcttcggctcacaggttgcggtcatgcacagcggattatccacaggtgaaaaatacgatgaatggcggaagattcagcgcaaggaagtccggcttgtcgtcggagccagatcggccatctttgccccgtttgaaaatctcggcatgatcattattgatgaagagcacgaatcttcctataagcaggaggaaatgccgcggtatcatgcaaaggacgtagccatccgccgggccgagcatcacagctgtccggtcgtcctcgggagcgccacgccgacattggagtcatttgcgcgggcgaaaaaaggcgtttatgagctgcttccattaaaacatcgcgtaaatcgccagctcatgcctgacgtttctctcgttgatatgagagaagaactgagaaacggcaacagatcaatgttttcaagagagctgatggaacagctggaagagaagcttgcaaaaaaagagcaggccgtcctttttctgaataaacgggggtattcctcgtttgtgatgtgccgggactgcggttatgtgccgcaatgtccgcattgcgacatttcaatgacttatcaccgctacggacaaaggctgaaatgccattactgcggccatgaggaacctgtcccgggaacatgcccggaatgcggcagcgaacatatccgctttttcggcacgggcacgcagcgtgtggaggaggagcttaccaaagtgctgcctcaggcgcgcgtgatcaggatggatgtggacaccacttcaagaaaaggcgcccatgaaaaactgttgtcagcgttcggtgaagggaaggcggatatcctgctcggcacgcaaatgatcgcaaaagggcttgattttccgaacgtgacgctcgtcggagtattaagcgcagatacgacgcttcacatccctgatttcagggccgcggagaagacattccagctgctgacgcaggtaagcggacgggccgggcggcatgaaaagccgggaacggtggtcattcaaacgtatacaccgtctcattacagcattcagctgacgaaaacgcatgactatgaaactttttttcagcaggaaatggcgcacagacgggcccagtcatacccgccttattattacgtggcgctggtgaccgtttctcatgaagaagcggcaaaagccgcggtcaccgcagaaaagattacaaactatttaagagcgggatgcgggcctgatacgaaaattctcgggccggcggcttccccgatcgccaggatcaaagatagatatcgctatcaatgcgtgataaaatacagacaggaaaacgagttgcagattcagttgaaaaagatactggagcactataaacgcgacattgcgcaaaagcatgtcatgatttcaatcgatatgaatccgtacatgctgatgtaacattagtttttggagggcaaaattttggctgtgaaaaaaatcgtcacacatccggcggaggttctggaaacaccagccgatgaagtgacagtgtttgataaaaaattaaaaaaactgcttgacgatatgtacgatacgatgctcgaaatggatggcgtcggcctcgccgcgccgcaaatcggcattttaaaaagagcggccgtcgtggacatcggtgaagaaagcggccggatcgaccttgtaaatccggttattcttgaaaagagcggtgaacagaccggagtcgagggctgcttaagctttcccggggtttacggcgatgtcacccgcccggattacgtaaaggtaaaagcctataaccgtaaaggaaaaccgtttattttagaagcggagggttttttggccagagccgttcagcatgaaatggatcatttagacggcattttattcacatcaaaaattacggcttactatactgaagaagaactggcagaaatggaaggatgattggatgacaaggatcgtttttatgggaacgcccgatttttcagttcccgtcctgcgcacgcttattgaagacgggtatgaagtggttggtgtcgttacgcagcctgaccgcccgaaaggcagaaaaaaaatcatgacgccccctcctgtaaaggctgaagctgaacgtcacggcattcccgtgcttcagcccgaaaaagtaaggctcgaagaagaaatagaaaaagtgctcagcctgaagccggacctgattgttacggcggcattcggacagatcctgcccaagcagctgctggacggcccgaaatacggctgtatcaacgtacacgcgtcactattgcctgaattaagaggcggagcgccgatacattattcgattctccaaggcaagaagaaaacgggcgtgacaatcatgtatatggttgaaaagcttgatgcgggcgatatgatttcgaaaatcgaagtggaaattgatgaaacggataacgtcggcacgcttcacgacaaattaagcatagcgggggcgaagcttttgtcagagaccgtcccgaacgtcatttccggaaatattaaaccgatcaaacaggacgaatcaaaagcgacttacgcgcctaacattaagcgtgagcaggagcggattgattgggcaaagcccggagaagagatctacaaccagatcagaggtttaaacccttggcctgtcgcctatacaactttgaacggtcaaaatatgaaagtatgggcttctgaaaaagttgcggcaaaaactgaagctgcgcccggaacagtcatccgcacggagcaaaacggcattgtcgtcgcatcaggaaacagcaccgcccttttaatcacagagctgcagccggcgggaaaaaaacggatgaagggcgaagattttgtaagaggcaaaaatgtgcagcccggtgacgtattaggagaagcaaatgaagaaaattaatgtccgggagctcgcccttgaagcgcttgagaagcttgagcaaaatcaggcatacagcaacctgcttcttacatcggttatcaaaacgaacacgctcagcgatcaggacagaggactgctgacagagcttgtctacggaacgctgcaaaataaaatcgccttagactacatgctgaagccttttatccgcaagccgaataaagtgaagccatgggtgattcagctgcttcgtctgtccgcgtatcaaatggagtatttagaaaaaataccggatcgcgccgccattcatgaagcggttgagatcgccaaaaaacgcgggcataagggcattgcgtcctttgtcaacggcatcctccgctccctgcagcgtgaaggggcgccgtcattcgctgaaattgaagacccggttctccgtctttccacagagacaagccatcccgagtggctcgtaaaagagtgggtcgaggcgtacggctttgaggcggctgaacagatctgccggattcatcttattccgccgaagcagacgctccgtgtcaatcacataaagagcgacagggaaacagtgctgaatgagatggagaatgccggtcttgaagcggaagccggagacctttctcctgatgcgattaagcttttaaaaggaagcatcgcgaacacggcatttttccaaaacggccgggtatccatacaggatgaaagctcaatgcttgtcgcgcgggcgctggacccgaagccgggcgaaaccgttttagacgcatgcgccgcaccgggcggaaagtcggctcacattgcggaactgatggagaacgaggggagcctcacatcgcttgatcttcaccgccataaagtgaagctgattaaagagggcgcagaacggctcgggcttacgatcatcgacgcgcaaacgatggatgcgcgaaaagcgggagaggcctttggcgcagaacggtttgaccgtgttctcattgatgccccttgctcaggtttcggcgtcatcagaagaaaacccgatatgaaatatacgaagacgccggaggacagcagccggctgtcagaaatccagctcggcattttaagggaaatcgccccattagtaaaaaaaggtggcacactcgtatacagtacgtgtacaatggaccggacagaaaatgaagaagttatgcatgcgtttatacaagaacaccctgagtttgaacccgatttgtctcttgaaaagcggctgcctgaaaaggcgagaccctttgttcaggatggaagccttcaaattcttccgcattatttcggaacagacggtttctttattagcagcatgagaaagaagggataaaaaatgacacaattaaaaaagacaagcgtacggaaagagctgcggactgagcagccgtccatttactcttttgaattagatgaaatcaaacaatggctgaccgagaatggcgaaaagccgttccgcgcagcacagatttttgaatggctttatgagaagcgggtttcttcatttgatgaaatgacaaacctctcaaaaagcctgcgtgaaaaactcgagagcaattttgtgctgacaacgctgaaaacggctgtaaaacagacatctcaagacggcacgatgaaatttttatttgagcttcatgacggttatacgatcgaaacggttttaatgagacacgagtatggtaattctgtatgtgtaacgacacaggtcggctgccggatcggctgcacattttgcgcgtcaacgctcggcggactgaaacggaatcttgaagcgggagaaatcgtcgctcaagtcgtgaaagtgcaaaaggcgcttgatgaaacggatgaacgcgtcagctcagtcgtcatcatgggaatcggagagccgtttgataatttcaatgaaatgctcgctttcttaaaaatcattaaccacgataaagggctgaacatcggagcgcgtcatatcacagtttccaccagcggaatcattccgaagatttacgatttcgcagatcaaaaaatgcagatcaatttcgcgatttctctgcatgctccgaatacggaaatcagaagccgtctgatgccgattaacaaagcctataagcttcctgaccttatggaggccgtcaaatattacatcgagaaaacaggcagacggatcagctttgaatacgggctgttcggcggcgtaaatgatcaggtcgaacatgcagaagagcttgcagaactgttaaaagacgtgaaatgccatgtcaatttaattccggtaaactatgtgcctgaacgggattacgtccgcacaccgagagatcagattttcgcattcgaaaaaacgttaaaatcccgcggtgtaaatgtcacgatcagaagagagcaaggccatgacattgacgcggcctgcggtcagcttcgcgcgaaggagcgtcaagacgagacgaggtgaagaggttgattacagccttgaaaacagatacaggtaaagtccgtcggcataatgaagatgcggcgggcattttcacaaaagaagacgcggtgcttgcggttgtcgccgacggcatgggcggtcatcttgccggagatgtagcgagcaggatggcggttgcggcgatggaagagcagtggaaccggaccgaaacggttccttctctgccgtctgcttgcgaggattggctgaaagaccggattcatgaggcgaatgtcaaagtacatgaccacgctaaagcgaatgaagaatgccggggaatgggcaccactgttgtttgcgccttattcaccgggaagtttgtcactgtggctcatatcggtgacagccggtgctacctgcttcaagagggggaattcactcagctgactgaggaccattcgcttgtgaatgagctggtcaagacaggagaaatttcaaaagaggacgccgagcaccatccgcggaaaaatgtattgacgagagcgctggggacagatgaaaccatcagtcccgacgcccgttcttttgaactgtctgacggcgatcagctgcttttatgctctgacggactgtcaaataaaatagaagatcacgagatcaaacaaatgcttcaagccgaatctgatcctcaggaaaaagtagaccttctcatcagcaaagcgaatcaaaacggcggcgaagataacatcacggctgtgttgattgagttttccgcagatgcaaaagagggtgaagacaagtgctaaccggcaagcggatcagcgggcgttatcatatcctccgacccattggcggcggcggaatggcaaacgtttttttagctgaggacatcattctcgaacgtgaagtcgcaattaaaattctgcggtttgactttgtgaatgacattgattttatcaggcgtttcagaagagaagcacagtcggcatcaagcctcgatcatccgaatatcgtcagtatttacgatatcggggaggaaggcgatatttattacattgtcatggaatatgtggaaggcatgacattaaaggaatacataaacgcacacggaccgctccatccgaaagaagcgctgtccgttatggagcagatcgtctcggccatcgcccatgcccatcaaaaccatatcgtgcaccgggatattaaaccgcacaatatattgatagatcatttagggcatatcaaggtgacggatttcggcatcgccacagcgcttacgtctacgacaatcacacatacgaattctgtgctgggctcggttcattatttgtctccggagcaggcgagaggcggtctggcaacgaaaaaatcagatatttacgcgctcggcatcgtgctgtttgagcttttaacaggtaaaatcccttttgacggagaatcagccgtcagtatagcgctaaagcatctgcaaacagaaacgccttccgccagaaagtggaacccttccattccgcagagcgtcgaaaacattattttaaaggcaaccgctaaagacccgtttcaccgctatgaaagcgccgaggacatggaagcggacatcagaacggcttttgacgccggcaggctgaatgaacaaaaattttccgtgcaggatgatgaggaaatgacaaaagccattcccgttattactgacggcgcaaaagccgcgcctcaggcggaaacgccgggggagacggatgataaggaacagcagcccgccaaaaagaaaaaacggaaatggccgtgggttttgctggccgcctgtttcattttcattatggcagctgttcttgcggttaccgtgtttccgtctttgtttatgcctaaagatgtaagcgtccccgacgtacggggcatgaagtacgaaaaagcggaagccctgcttgaaaagaacgggctccgggcggatcctgatataacggacattgaagatgaaaaaatagaagaggaattaatggtcaaaacggacccaaaagcgggctctaccgttaaagaaggctcttctgtaaaactgtacaaaagcatcggaaaaccgaaaacccagctgatcgacgtgaaaggacggcagatcggcgacgcaaaaaaagtgctgaaggaaaaaggcttcaaacatgtcaatgtcaaagaagagaacgatgacagcgaggccggcaccgtaattgatcagaacccgtcagccggcaccgacatggtcgcaagcgacgatgaagtcaatctaacggtcagcctcggcccggcggacgttacgctgagggacttaaagacttacagcaaagaagcggcttcagggtatcttgaagataacggcctgcagcttgttgaaaaacaagcccattcagatgacgtgccggaaggacaagtcatgaagcaagagccggcagccggcactgcggttaagccgggaagtaatgttgaagtgacgttctcgctcggacctgaagaaaaaccggcgaaaacggtaaaagaaaaaatcagcattccttacgaacccgaacatgaaggggacgagcttgaagtgcaaatcgccatcgatgataaggaccacagcatctctgatacgtatgactcatttaaaataaaagagccgactgaaaaaacaattgaactgaagattgatcagggacagaaggggtattatcaagtgatggtcgatcataaagtcgtcagctacaaaacgattgaatacccgaaagataatgactgacaaggagggaccctatgcctgagggcaaaattataaaagcgttaagcggattctattatgtcttggatgaatcacaggacaagatcattcaatgcaggggccggggcattttcagaaaaaataaaataacgcccctggtcggcgattatgccgtttatcaggctgaaaatgataaagaaggctacctgctggaaatcaaagaacgaacaaacgagctgatcaggccgccgatttcaaatgtcgatcaggccgttcttgtcttttctgccgttcagccggcgttcagcacgtctttattggaccgttttctcgtccttgtggaagccaacggcattcacccgatcatctgcataaccaaaatggacttagctgcagacggggaatcgaaagaggcgatactttcttacgtgaaagactatcaggcgatcggttatgacgtatatgtgacgtcatcaaaagaaaacagcggtttaacaggcattgtgaaacacttcgagaacaaaacaacggtgtttgccggtcagtccggagtcggaaaatcttcgcttttaaatgcgatcagcccggagcttgagctgaaaacaaacgagatttccacgcatttgggacgcggaaaacatacgacgcgccatgtggagctcattcatacatcaggcggtctggttgcggatactccggggttcagttcgcttgaatttaccggcattgaggaagaagagctgggcagcacgttccctgagatcagagaaataagcgcctcttgcaaattcagaggctgtctgcatcttaaagagccgaaatgcgcggtaaagcaagcggtggaagaaggagagattcagccgtaccgctatgagcattacaaagaatttatgcaggaaataaaagagagaaagccgaggtattaatatgattaaggttgcgccatcaattctttccgccgattttgcttcactgggcgaggaaattaaagacgtggaaaaaggaggggcggactatatccatattgatgtcatggatggccatttcgtccctaacattacaatcgggccgcttatcgttgaagccgtccgtccggtgactgatctgccgctggatgtccatcttatgattgaaaacccggaccgctacatcccggcattcgcaaaagccggtgcggacatcctttccgttcatgctgaggcgtgtccgcatcttcaccggaccattcaattgataaaagagcagggggtaaaagcgggagttgtgctcaatccgcatacgcccgtccaaatgattgaacatgtgatcgaggagcttgaccttgtgctgttaatgacggttaaccccggttttggcggacagcgcttcattcattcggttctgccgaaaatccgtcaggtcaaacagctggctgaggagaaaggcctgtctgagcttttaatcgaggtggacggaggcgttaataaagaaacagcccctttatgcactgaagcgggcgccaatctgcttgttgccgggtctgccgtatataatcagccggatcggaaaaaagccattgctgacatccgaaacgcgtaataaacatgctgaaaaagagcccggtgaaagccgccggctcttttcgcgtctaagagagaggaaaacatatgaagacaatcaatatcgttgcgggcggcccgcgggagcttattcccaatctatccgaatacactgacggagatacgacgtgggtcggagtcgataaagggacggttgctcttttggaagccggaatcattccgcaggaagctttcggtgattttgacagcattacggaagaggagctcatgcagattcaaaaagcggcgccggccctccatgtgtatcaggcggaaaaagattataccgatcttgaactcgcccttgactgggctttacaaaaagaaccggaaaccattcggatattcggtgtgacgggcggaagagccgatcactttttagggaacatccagctgctgtataaagccttacataagaataccgatgtcgtgctgatcgaccggcagaatgacattcagatgttcgggcccggccgttatacaattgaagaaaaagcgcgcagacgctatatttctttcattccgtttacggaagcggcagacggcctgacactcgacggttttaaatatccccttgataattgtcatattcctctgggttccacactatgtattagtaacgaactcattcattcacgaggtactttttcgtttgcaaaaggcatattaataatggtaaggagcgcggattagaaaagcggcttctgccatatgcggaaaaaaccatgaatcctaaagtgatgaacgcagcggatacgggacttataggaggggacaaaatgaaattttataccattaaattgccgaagtttttaggaggaattgtccgggcgatgctgggctcatttagaaaagagtaagcccaagaagctgaaattgccctctttgaacgcataaaaaacgcctgccgcataaaagggcaggcgttcatttttgcttatacacgctcaactttaccggattttaaagcccgggcagatacatacacttttttaggtttgccgtcaacaaggatgcggaccttttgaaggttggcgccccaagtacgcttagaagcgttcattgcgtgagaacggttgtttccggcttttgtttttttacctgtaataaaacatttacgtgccatttgtttccctcctaactgcgcgaaacatcttttcaaacatagtgtctcagatgctttcgttatacaatactttaaataatttaccacagctaaaaaccgtttgcaactattgtttcccttactttcaagaaaaatcacttgacatgtaaaaccaatcacatttccgcgctgaaggccgctgtctgtatcttttcttttcataatgggatacatatagtagaataatgataactctatgcatctgaaggaggaacctgtgtgtccattgaaatgaagacaaaatacggacagattgatatatccaacgaagtcatcgcaatggttgccggaggcgctgccattgactgttacggaatagtggggatggcctcaaaaaaccagattaaagacggtttgtctgaaatcctccggagagagaacttcgcaaaaggcgtacatgtccgtcaggaagccgaacaaatacatatcgacatgtacattattgtcagctacggcactaaaatatccgaagtagcccacaatgttcagacgaaggtaaaatacacagtaaatcaaacaatcggacttgcagttgattctgtaaatatttatgtccaaggcgtacgagtaacgaacccgtagtgaggaggatgagtattgtctagacgaaacttagatgggagagcttttgcggcaatgattctggcgggggctgagacattgtctcaaaacgcatccgcggtggatgcgctgaacgtgtttcccgtgcctgacggcgacaccggaacaaatatgaatttatcgatgtcatccggtgcaagagaggtagagcacattgactcacccgacatcggcaaagtcggcatcgccttgtcaaaaggcctgcttatgggagcgagaggaaactcaggggtgatcttgtcccaattgttcagaggtttcacaaagagcattgaaaacaaaaaccaaatagacgcccaagaatttgccgcagcactccaagcgggagtggatatggcatataaggcggtcatgaaaccggttgaaggaacgattttaaccgtggccaaggatgcggctaaaaaagcggtcgcctcggccaaagaagaaaccgatattatttcggtcatggaggccgttattgaagaagcggaagcgtcgctgaaccgcacgccggatctgcttcctgttttaaaggacgtcggtgtcgttgacagcggcggaaaaggtctgctttgtgtatatgaaggctttttggctgctttaaaaggagaggccgtaccgaaaaaagcggttcttccggcactcgatgatatggtgaatgccgagcatcataaaagcgcgcagagcatgctgagtacagaagacattgaattcggattttgtacggaagtgatggtaaggctggatcaagataaacggacgttcaaggaagagacgttcagaaacgaactgagccgtttcggcgattcattgctggtcgtggctgatgacacgctggcgaaagttcatattcatgccgaagaaccagggaacgtactcaatctcgcacagcgttacggcgatttgattaaaattaaaattgaaaacatgagggaacagcatacttcaatcatcagccaagaacatgatgaaaaaaagccggccggcgttatgaaagaagcccgcaagccttttggcatcgtgactgtggcaatgggagagggcatttctgaattgtttacgagcatcggcgcttcacacgtaatcgaaggcggccagacaatgaatccgagcacggaagatattgttgaagccgttcagtctgtcaatgcggagacggttttcattcttccgaacaattccaatattgtgatggctgccaatcaggcggcgagcgtggctgaagaaaatgtcattgtcattccggcaaaaacggtccctcaaggcatgaccgccctgcttgcgtttaaccctgaccagccggctgatgtaaatgaagccaatatgcttgaggccatccggaatgtgaaaagcggacaggtgacatattcagtcagagacacccatatcgacggcaaggatattaaaaaaggtgattttatcggcattttaaacagttcaattatcggcagcgccgaagatcggataagtgcggcgaaattgctgctggatgaaatgatcggggatgaagatgaaatcgtcaccatcctgtacggagaggacgcgccggaagaagaagctgagaaactcgctgagtatattgcaagcgtctgtgaagatatcgaggttgaaatccataacggcagacagcctctgtatccatatatatttgcggcagaatagaagggcttatcaggcccttctattcttatgcctttatttacctgcggcagtgcggcagtgtgcctgcttgccaattgagaaatgttcaattagtctaaagaaaagcgctgaatgaagtgatgttaaggaggagcaaaccagcatgaagtatagaagcgtttttgatattatcggcccggtaatgatcggtccgtccagttcacataccgcaggcgccgcccggatcggcagagtggccagaagcttattcaggcgggagccccgccggatcgttgtgtctttttacggttcatttgcggaaacgtataagggtcacggcactgatgtcgcgattatcggcggcctgcttgattttgatacatttgatgaacggattaaaacagcgattcaaattgcggaagagaagggcatatatgtagagttccgtacagaggatgccgtgcccgttcatccgaatacggcgcgtatcgtcatttctgatgatgagggagagcttgcccttaccggtatttccatcggcggcggaaaaatagaaatcacggagctcaacggctttgagctgcgtttgtccggaaaccatccggctattttagtcgttcacaatgataaattcggcacgattgcaggcgttgccaatgtgcttgcgaaattctccatcaacgtcggacatatggaagtggcgcgtaaggacgtcggccagcttgcgctgatgacgattgaggtcgatcagaatattgaagaagaagtgcttgacgagctttcaacacttcctaatattatacaggttactaagatagctgactaaaaagtcaggaggaaaatgacatgtttcgtaatgtaaaagaattaatagaaatcactcaagaaaaacaaattccgatttcggaagtgatgatcacccaagagatggaagtgacgcaaaaaacgcgggaagaaatctttcaaggaatggagcgcaatctctccgtcatggaagcagctgttgaaaaagggctgaagggcgtcacgagtcagaccggtttaacaggcggagatgccgtgaaacttcaggcatacatccaatcgggaagaagtctgtcgggcaatctgattttagacgccgtttctaaagctgtggcgacaaatgaagtcaatgcggcgatgggaacgatctgcgctacaccgaccgccggctctgccggggtcgtgccgggaacgttattcgccgtaaagcataagctgaatcctacgacagaacaaatgatccgttttctgtttacagccggcgcgttcggttttgtcgtagcaaataatgcgagtatttcaggagcggcaggaggctgtcaggcggaagtcgggtcagcatcaggcatggcagcggctgcgattgtggaaatggcgggcggaacgcctcagcaatcagcggaagcaatggcgattacactgaaaaatatgctcggtctcgtatgtgacccggtcgccggattggtagaagtgccgtgtgtcaaacgaaacgcaatgggagcatccaacgcaatgatcgcggcggatatggcgctggccgggattacaagccgcattccttgcgatgaggtgattgacgcgatgtacaaaatcggccagacaatgccggcagcactgcgtgaaacgggacaaggcggtttagccgcgacaccgacgggaagagaattagagaaaaaaattttcggaggagcgctgaaatcaagtggcacaccatcagcaaactagtatagcggaaattaagggcattgggccggaaacagaaaaaacattgcacgaacttggtatctatgacatttctgatcttctgaattatttcccttaccgttatgacgactatgagctgagggatttagaagaagtaaaacatgaagaaagagtgacggtagaagggaaggttcattcagaaccttctcttacctattacggcaaaaaacgaaacaggctgacattcagggtgcttgtcggcaattatttaattaccgcggtctgctttaaccgtccctacttaaaaaagaaactgacgttaggttctgtcgtcacgatatccgggaaatgggataaacacagacagaccgtttccgtgcaggaattaaaaaacggtcctcatcaagaagataaaagcattgagcctgtttattccgttaaagaaaacgtcaccgtaaaaatgatgagacggtttattaaggaagcgctgcagcatcatttggacagtgcggccgatccgcttcctgaaaaattgagaatccgctacaagctgcctgattacaaacatgccctgcagacgatgcatcagcctgaaacgagggaatcgttacagcaggcaagacgccggtttgtttacgaggaattcttattatttcagctgaaaatgcaggcgttccgtaaagcggaaagggaacagtcaaaaggcatcagccatgtgtttcctgctgaaaagctcgccgctttcacagacagcctgccgttttcgctcacaaccgcacagacgcgtgtgcttcgggaaataaccgctgatatgacatccccttaccgaatgaaccgtctgctgcaaggtgatgtcggttcagggaaaacggccgtcgccgccatcgctttgtatgctgcgattttgtcggggtatcagggggcattaatggtgccgactgaaattctggccgaacagcatgcagattctctcgtatcgttgtttgcaaatgaagatgtaaatatcgcgcttttgacgagttctgtcaaaggaaagcggcgcagggagcttttggagcggcttgctctcggagagattgatattttagtagggacccatgctttaatccaggatgaagtggaattcaaagcgctgagccttgttattacggacgagcagcaccggttcggggtcgaacagcgcaaaaaactcaagaataaaggtcaggatccggatgtgctgtttatgacagctactccgattccgagaacgctggccattaccgtcttcggagaaatggatgtttccgtgatagatgaaatgcccgcggggcgaaaacaaatcgaaacgtattgggtgaaacacgacatgctggagcggattttggcttttatagaaaaagagctgaagcagggaaggcaagcctatgttatctgcccgctcattgaagagtcggataaactggatgtacagaatgcgattgacgtatataacatgctgtctgacgtttaccgcggtaaatggaatgtcggcctgatgcacgggaagctccattctgatgaaaaagatcaggtgatgagagaattcagcgccaatcaatgtcaggtacttgtgtcaacaaccgtcgtagaagtcggggtgaacgtgccgaatgcgacgattatggtcatctatgacgccgaccgtttcgggttatctcagctccatcagctccgcggccgggtcgggcggggagaccaccaatctttctgcatcttgatggcagatccgaaatccgaaaccgggaaggaacggatgagaatcatgtcagagacaaacgacggcttcgagctgtctgaaaaggaccttgaactgcgcggccccggtgatttcttcggaaaaaaacagagcggtatgcccgagttcaaggtggcggatatggttcatgactacagagctttggagacggcccgccaggatgcggccaatctggtgtcttcagaggctttttggaaagatgacgaataccgcatgctgcgcggtcaattactttcaagcggcgtcctggaaggggagaaattaagctgattctgcaaaattcggcggctttcaaaaaacaatcattgcattccaatctatgagattatatactactattagtacctagtcttaattgtccggatggtgtttacagatgagaagaagcaagaaagaacgccaaaaattattgcagcagacgatcaaatcgacacccttcatcacagatgaagaattagcggggaaattcggcgtcagcattcagacgatccgtttagaccgcttagagctctcaataccggagctgagggaaagaattaaaaacgtggcagaacaaacgcttgatgatgaagtgaaatcactgtctttagacgaagtgatcggtgaaattattgatctggagcttgacggccaggccatttccatattagaagtaagacgcgaacatgtcttcagccgcaatcaaattgcgcgggggcatcatttgtttgcgcaggcgaactcactcgccgtagccgtcattgatgatgagctggcgctgaccgcaagcgcaaatatccgctttacaagacaggtgaaagaaggcgagcgcgtcgttgcgaaagccaaagtgacggcagtcgaaaaagaaaaaggcagaacggtagttgaagtcaacagctatgtgggagaagaagtcgtgttctccggcagctttgacatgtatcgttcaaaacaatcataaaggtggagcatgcatgagaatagctgtagatgcaatggggggcgacaacgcacccaaagctgttattgacggagtaatgaagagtattgaggcatttgacgatcttcatattacgctggtcggtgacaagacaacgatagaatcacacttgccaacaacatcagaccgcatcactgtgttgcacgccgatgaagtgattgaaccgacggatgaaccggtccgcgccgtacgcagaaagaaaaactcttctatggtgctgatggcgcaggaagtggctgaaaacagagcggacgcctgcatctcagcggggaatacgggcgcactcatgacagcgggactgtttatcgtcggcagaattaaaggaatcgaccggcctgcgcttgcgccgacgcttccgaccgtttcaggcgacggtttccttcttttggacgtgggagccaatgtcgatgccaaaccggagcatctcgtccagtacggaattatgggatctgtatatgcccggcaggttctcggaatcagctcgccccgcgtcggattgttaaatgtcggcacggaagaaaagaaaggaaacgacctgacaaaaaagacgtttgaattattaaaagaaacaaacgtgaattttgtcggaaacgttgaggcgagagacttgctcgaaggcgctgctgacgtcatcgtcacagacggctttacgggcaacgtcacgttgaaaacattggaaggttcagcgttatcgattttcaaaatgctgaaagatacactgacttcaagttttgtttctaagctcgcagcgggagtgctgaagccgaagctgatggaaatgaaactgaaaatggactattctgagtacggcggggcgagtcttttcggtttgaaagcgcccgtcgttaaagcgcacggctcttctgacgcacgcgctgtttaccatgcgctgcgccaggcgagagaaatggtcagccaaaacgtggccgcatttatagaagaagaagtaaaagaagaaaaaacagatgagtagtctggaggttaccgcatcatgagtaagattgcatttttatttcccggacagggatcacaatatatcggtatgggaaaagacctgtacgaacgcgaagaagcgtcaaaacgtatttttgatgaagcggacgaaacgcttgaaacaaagctgagctcgctcatttttgaaggtgacgccgaagaattgacccttacatacaatgcgcagcctgcgctgttgacaacgagcatcgccgtattggaaaagtttaaagaatccggcatcacccctgatttcaccgccggccacagcctcggagaatattcggcgcttgttgcggcgggagcgatgacatttaaagatgccgtttacacggtaagaaaacggggagaattcatgaatgaagccgtgccggccggagaaggcgccatggccgctattctcggaatggatgcggagtccttgaaaaaggtgacggatcaagtgacggaaaacggtcatctcgtacagcttgcaaacttgaactgccccggccagatcgtcatttccggaacggcaaaaggcgtggagctggcttcagaagaagcgaaaaacaacggagcaaaacgggcaatcccattagaagtaagcggaccgttccattctgaattaatgaagccggcagcgcaaaaactcgaggaggtgctcagcgcctgtgagttaaaaaatgcggctgttcccgtgatttcaaacgtttcggctgacgttatgacagaaaaagacgatatcaagaaaaaactgatcgaacagctgtattcacctgttcgctttgaagaaaccattaacaaactgattgacgaaggcgtcacgacgtttgttgaaatcgggccgggaaaagtgctttcaggccttgtgaaaaaagtgaaccgccgccttaaaacaatcgcggtttctgaccatgaaaccatcgaactggcgattcaaacgctgaaggaggagaatcaggatgcttaatgaaaaaacagcagtggtaacgggagcgtcccgcggaatcgggcgggcgatcgcgcttgatcttgcgaaaaacggctgtaacgtagtagtcaactactccgggaatgaagcgaaagcgaacgaagtcgtagatgaaatcaaatctttgggccgaaacgcgatcgcggtaaaagccgatgtatcaaattccgaagaagtacaaaacatgatgaaagaggctgtcgctgcattttcttcaatcgacattctcgtgaacaatgcggggatcacaaaagacaatcttctgatgagaatgaaagaaaatgaatgggatgatgtcattaacattaacctgaaaggtgtattcaactgcacgaaagccgtgacaagacagatgatgaaacagcgctccggccggattatcaacgtatcatcaatcgtcggcgtcagcggaaaccccggccaggcgaactatgtggcggcaaaagccggtgtaatcggcttaacgaagtcatcagccaaagagcttgcgagccgcaatattacggttaatgccattgctccgggctttatttctacagatatgacggacaagctttctaaagaagtccaagatgaaatgctgaagcagattccgctcgcgcgtttcggtgatccttccgatatcagcagcgttgttacgttccttgcttctgaaggatcgcgttatatgacgggccaaacccttcatattgacggcggaatggtgatgtaaagatttgtttttaaaatttcatcctagtttctctagttttttaaaaacgaatcctctataatacttgaggggaggtgaattgctatggcagatacattagagcgtgtaacgaaaatcatcgtagaccgccttggcgttgatgaagctgacgtcaaacttgaagcttctttcaaggaagacttaggtgctgattccctagatgtagttgagcttgttatggaacttgaagacgagtttgatatggagatttctgacgaagatgctgaaaagattgcaacagtcggcgacgctgtgaactacatacaaaaccagcaataagctgatgctaaaagtcccgcctgacagcggggctttagccctttaatcgttcggttaccggcgtctgacgctgtacgcgctgccgattccgtttacggcggggagcgcggtgaacctgatgtgcctatggaggttactatgtcaaaacactcacattttaaagataaaaaaaagttctataaaaaaatagagcaatttaaagagttccaagaacggatttcggttcattttcaaaacgagaaacttttgtatcaagcatttacacattcatcttatgtgaatgagcatcggaaaaagccgtatgaagacaatgaaaggcttgaatttttaggtgacgctgttttggaactgacgatctcccaattcttatttgccaaatacccggccatgagtgaaggagatttgacgaagctgagagccgctatcgtatgcgagccgtcactcgtctcacttgcccatgaattgtcattcggcgatcttgttctcttgggaaaaggagaagaaatgacgggcggcagaaagcgtcctgcgcttttagcggatgtgtttgaagcgtttatcggcgcactgtatctggatcagggccttgacccggttcagcaattcctgaaagtgtacgtgttccctaaaataaacgatggtgctttttctcatgtgatggatttcaaaagccagcttcaagaatttgtacagcgggacggaaaaggatcgcttgagtacaaaattctcaatgaaaaagggcctgcccacaaccgggaattcgaggcgctagtctctcttaaaggtgaggcgctcggtatcgggaacggacgttccaaaaaagaagccgagcagcatgcggcacaggaagctcttgcaaaattgcaaaaacatcatacgaaacaataaaatccccctgtatccctagggggatttcagtatgtctgcgcctgatataagcgggtgattatgataatattgagatacttatacgataaggaggatctgggatgttcctcaaacgtttagacgttataggatttaaatcatttgcagaacggatatccgttgactttgtaaaaggcgtcacggccgttgtcggtccgaacggcagcggaaagagcaacattaccgaagctatccgctgggtgctcggcgaacaatcagcccgctcgcttcggggcggaaaaatggaagatatcatttttgcgggaagtgattcacgcaagcggctgaaccttgccgaagtcacgttaacgcttgataatgaagatcattttctcccgatcgattatcacgaagtcagcgtgacgagacgggtgtaccgttccggagagagtgaatttctcatcaacaatcagcagtgccgtttgaaagacatcattgacttatttatggactccgggctcggaaaagaagcattctctattatcagccaggggaaagtcgaagagattctcagcagcaaagcggaagaccgccgcagtatttttgaagaagcggccggcgtgctgaaatataaaacaagaaagaaaaaagcggaaaacaaactgtttgagacgcaggataacttaaacagggtggaagatattcttcacgagcttgaagatcaggtcgaaccgctgaaaatccaggcatcaatcgccaaagactacttagaaaaaaagaaagagcttgagcatgtcgaaatcgcccttaccgcctttgacatcgaacaactgcatggcagatggtcgggtttaaaagacaaggtgcaggctgctaaagaagaagaattggcggaatcatcggctctatccgcaaaagaagcgatgatagaagagacgagagataaaatccacgcgcttgatgaatccgtcaacgaactgcagcaggttctgctcgtgacaagtgaagagctggaaaagctggaaggccggaaagaagtgctgaaagagcgcaaaaaaaacgccgcgcaaaaccgggaacagcttgaggaatccgttacacattacacgaacaaagaagccgaactgaaagcggacattgaaaaacagtctgccgtctatgataagctgcgtgcggaagtgaagcggttaaacgcccaagtgaaagaaaagcagcaggctctcagtctgcataatgaaaatgtagatgagaaaatcgaacaattaaaaagcgattactttgaattgttaaacagccaggcgtcgattcgcaacgagctgcagcttttagatgaccagatgtcccaatccgcggtccagcaggcgagactgacagcaaacaatgaaaaatatcttgaagaacgtaacgatattgcagtccgcaaagcggcgtgcgaagaagaattggctgccgttgaagaggatattcacaatcaggtcgtccgctttcgcgaagtccagacagcatatgaacagaaaaaacgccagtatgaaaagaaagaatcagcgctgtatcaggcatatcaattcgtccagcaggccagatccaaaaaagatatgcttgaaacgatgcaaggcgatttttcaggattttaccaaggcgtaaaagaagtgctgaagcagaaagagaagctcggcggcatccgcggcgccgttctcgaactgattgccaccgaacaaaagtatgaaacggcgatcgagattgcactcggcgcagcggcgcagcacgttgtcacagacgacgagcaggcggcgcggaaagcgattcaatatttaaaacagaattcattcggccgcgcgacgttcctgccgcttacggttatgaaaccgcgccagctccaaacccgtgatgaacagacggctcagaagcatccgtctttcctcggcacagcgagcgggcttgtcacatatgatgccgcgtatcggaatgtcattcaaaaccttctcggcaccgtgctgatcactgaagatttaaaaggcgcgaatgaactggccaagcttctcgggcaccgctaccgcatcgtgacgcttgagggcgatgtcgtcaatccaggcggatcaatgacaggcggcgcggtcaaaaagaaaaacaattctctgctcggcagaagccgtgagcttgagacggtgactgcgcggcttgccgaaatggaagaaaaaacagctctgctcgaaaaagaggtcaaaacgctgaagcaggccattcaagagcttgaacatacgctgagcggtctccgtgaagacggtgaagctttcagaacaaagcagcaggatgtaaaaggcaggctgtatgaactcgaagttgctgaaaagaacatcaatacccatctggagctttacgatcaggagaaagcatcactgaccgaaagcagccgggaaaaagagacgcgcaaatcagctctggaagaacagctgagtgaggcatccggccagctgaaagagcttgaggaagagatggaaaggctgacaaaacaaaagcagaccctatcctcaacaaaagaaacgctctctcatgaactgacggaatgtaaagtggccgctgcgaaaaaagaacaggcttgttcgagtgaagaagacaacctcaaacggctgaaaaaagagcttgaagaaacgcagctcgctctgaaagaaacacgggaagatttaagcctcctgacctcagagatgacgtccagcacaagcggtgaggagcagcttgaagaagcagcccatcacaagcttcacgataaaacgagaacgatcgaattgatcgccagccggcgcgaccagcgtgtgaagctccagcgggctcttgatacgaacgagcttgaactgaaagaaatgaagcgtctgtataagcaaaaaacagacattctgaaagatgaagaggtaaaactcggccggatggaagttgagcttgataatctcttgcagtatttacgcgaggaatacagcttatcctttgaaggagcaaaagaacaatatcagctcgaactcgagcctgaagaggcgagaaaacgggtcaaactgatcaagctttcaattgaagagctcggaacggtcaatctcggcagcatcgatgaatttgaaagagtaaacgaacggtatcagtttttaacagagcagaaaaatgacctgacggaagcgaaaaatacactgtttcaagtcattgaagaaatggattctgaaatgacgaagcgattccatgaaacgtttatccagatccgttctcaattcaacgacgtgttccgttctttattcggaggaggacgggctgaactgaagctgactgatccgaatgatcttcttaattccggggtggacattatcgcgcagcctccgggtaaaaaactgcaaaacttaaatcttttgtcagggggagaacgggcgctgactgccattgcccttttattctccattctgaaagtaaggcccgtgccgttctgcgtccttgatgaagtggaagctgcgcttgatgaagccaatgtattcaggtttgcgcaatatttaaaaaaatacagcggcgacagccagtttatcgtcatcacccacagaaaaggcaccatggaagaagcggatgtcctctacggtgttacgatgcaggaatccggcgtttcccgaatggtttcggtcaaactggaagaaacaaaagaattcgttcagtaacgaggaaagaggttgaaagatgagcttttttaaaaaattaaaagagaaaatcacgaaacagacagactccgtctctgaaaaatttaaagatggtcttgaaaaaacaagaaattccttctcaaataaagtgaacgaactcgtctcccgctaccggaaagtcgacgaggatttcttcgaagagcttgaggaagtgctgattggcgctgacgtaggttttacaaccgtcatggagctgattgatgagctcaaaaaagaagtgaagctgaaaaacatccaggatcctcaggaagtgcagtccgtcatttctgaaaagcttgtcgacatttataacagcggcgacgaacagatttctgaattaaatattcaggacgggcgcctgaacgttattctgcttgtcggggtaaacggcgtcggaaaaacgacaacgatcggaaaacttgcccataagctgaagaatgaaggcaaatccgttgtgctcgctgccggagacaccttcagagccggggcgattgaacagcttgaagtgtggggggagcgtacaggcgtgcctgtcattaaacaggctgccggaagcgaccctgctgcggttatttatgatgccgtacacgcggctaaagcaagaggagcggatgtgctgatttgtgatacggccggccgccttcagaataaagtaaacttaatgaaagagcttgaaaaagtcaaacgcgtcatcgaacgcgaagtgcctgaggctccgcatgaggttctccttgcgctggacgcgacgacaggccaaaatgcgatggcgcaggcgaaagaattctccaaagcgacgaatgtgacgggtatcgcgttaacgaagcttgacggcaccgctaaaggcggtatcgtcctggcgatccgcaatgagcttcacatccccgtgaaactggtcggcctcggagaaaaggttgacgatctccagcggtttgatgcagaatcttacgtatacggtctcttttctgatttagttgaaaaagccgaggattaatgaataaaaaacgagtataaaatggacggttttatactcgtttttttatacgcattgatagatcggaatggagggggcaattgttggacaaatggctgaaagctgaattggaaagtaagatcggcgcgataaaccatatgtcgctgttggatgaacagggaggcacttcaaccgttcggaaaatagtgaccggccaagacgcatttctgctgaaaagttcttttcaacagaagtatcgggaatggttaatgagagaagccttcgttttacaaaaactgacggaaactcgtcgtctgcctgttcctatttattatgggatgatacaggaacagcatgccagccatatcgtaatgtcatttgaggatggaatcacactgacttcggctttaagaaaagcaaaaggggatactgaaaagaaaaagctgatcaaaagtttcggccagtttctgcaacgtctgcatgaaaccgaaatggtctctggtttacagccggaaacagactggctcgatctgcaaatcaaacgagccggggaatatgtcaaaaaaggacaggctgaaggaagtgcagagcttttgaaggaattggacaggtgcaggcctgttcctgttcagcagacaatgattcacggtgactgcacgactgataatgtgctggtgaaagacggagaggtctatctgtttatcgatgctgcgggaatatcggcgggagatccgcgatatgatgaatcattagcgatcagtcattttgtcacaaatgaagcatgcctcaatgctttttacgaaggctattgccgctatcgtgtatcaaaacaagaattcgagtattttaacgacggtctatatgaatttttttgaaaaaacttattatgtaaaaagagcatcctgctttgacaagataaaaacttgacacacgctctgaaaccatgtaaactaagtttttgtaaagggatttgacttaacaaaggggagagctcaaatgtcgctcgaaaaaacgacgagaatgaactatttatttgacttctatcagtcgttgctgacgtcaaaacaaaagagctatatgtcgctttattatctggacgatttctcccttggtgaaatagccgaagaatatgacgtttcaaggcaagccgtttacgataacatcaaacggactgaagcgatgcttgaacaatatgaagaaaaactgctcctttttaaaaagtttcaggagcgtaaagaaatgtttacaaagctgaaagagcttgcttccgggttgcaggaagaggaaaaaatgacggctctgattgaagcgcttgagaaattagattaggaggcggcaaacaatggcatttgaaggattagccgaccgactgcaaaagacgatttcaaaaatccgcggaaaaggaaaagtcagcgaacaagacgtaaaagagatgatgcgtgaagttcgtcttgcgcttcttgaggctgacgttaactttaaagtcgtaaaggattttgtgaaaaaagtaagtgaacgggctgtcggacaggacgttatgcagagtctgacacccggtcagcaggttattaaagtcgtaaaagaagagcttaccgagctgatgggcggcgaagaaagcaaaattgccgtcgccaaacgccccccgaccgttattatgatggtcgggctccaaggtgccggtaaaacgacaaccacggggaagcttgccaacctgctgcgcaaaaaacataaccgcaaaccgctgctcgtggctgcggatatttaccgccccgccgcgattaaacagctggaaaccctggggaaacagcttgatatgccggtcttttcgcttggcgatcaggtcagcccggtggaaattgccagacaggcgattgaaaaagcgaaggaagagcatcatgattatgtgattttagataccgccggacggctgcacatcgatcatgaactgatggatgagctctccggcgtaaaggaagtcgcaaatcctgaggaaattttccttgtcgtcgactcaatgaccggtcaagatgcggtaaacgtcgccaaaagctttaatgaccagctcggtttaacgggcgtcattttaacaaagcttgacggggatacccgcggaggtgcggcgctttctatccgcgcggtcaccgaaacgccgattaaattcgccggaatgggagaaaagctcgatgctcttgaagcgttccatcctgaacggatggcatcccgaattctcggaatgggtgacgtgctgaccttgattgaaaaagctcaggcgaccgttgatgaagacaaagccaaagagcttgagcagaaaatgagaacgatgagcttcacattggatgattttctggagcagctcggccaggtccgaaacatggggcctcttgacgaactgttgcaaatgatgcccggcgcaggcaaaatgaaaggcttaaaaaacatccaagtcgatgaaaaacagctgaatcatgtggaagcgatcattaaatcaatgactgttcttgaaaaagaacagccggatatcattaacgccagccggcggaagcggattgccaaaggaagcggaacatccgttcaggaagtcaaccgtcttttaaagcagtttgaggaaatgaaaaaaatgatgaagcagatgaccaacatgacaaaagggaagaaaaaaggctttaaattaccttttatgtaatcggttatacatgataaaaccgttgttaagaaaaaacactttacaaacacttttatcattgttaatatactatcttgttgaaatattttcggaggtgctagtaaaatggcagtaaaaattcgtttaaaacgtatgggagcaaaaaaatctcctttctatcgtattgttgtagcagattctcgttcaccgcgtgacggccgtttcatcgaaacagtcggcacatacaacccggttgcaaagccggctgaagtgaaaatcaacgaagagcttgctcttaaatggcttcaaacaggagctaaaccttctgatacagtccgcaacttgttctcaagccaaggaattatggaaaaattccacaacgctaaacaaggcaagtaatgactgatcagaacttggaagatttgattgtcagcattgtggctccgcttgtcgaccatccggaagacataacggtcacaaaggaagagactgatcaaaagattgcgctgcgcttatctgtcaataagtcagataccggtaagattatcggaaagcaaggccggactgcaagagcgattcgaaccgtcgtttttgcagctggcgcacagtcttctaagaaagttcaatttgaaatatttgactgaaaaagggagagggccggcacctcccctttttttacacgtaaaaaaggcaaatgaacagaaatatgttggaagagtggggagtctggtcctatgcagattattcacagagtaaccgttatgcaggttctgaccgagcaaagcaaggaaaagcttttggcctcttttgcagaaaaaaagcaaacgcttgaacgagaatgcagccagctctattttcagcttagaaaacatgaaaaagatcagcagaatcccgatgtagcggaatcttttaaaaaagccattgagaaaagacaagacaaaatcaaaatgatcgatttccaaataagccagacagagtcgctcccgcttggaagcgaagtgaaggaaaaggagatcgatgcgctgctttcaatcaacgtcggtgataactggcatgaaaaaacagcggcaaataccatcgtcataaaagacggggtagtaattgaaatccgcccgaggtgataatatgacaaacagatggtttaatgtaggcaaaattgtaaatacccacggcattaaaggcgaagtgcgggtcatttctaaaacggactttgccgaagaacggtacaagcccggcaatacgctctatttgtttgcggaaggggctgcggagccaatcaaagtaacggtcagcgcccacaggcttcacaagcagtttcacctgctgcaattcaaagaaatgccgagtctcaatgaagtcgaacacctaagaaacatggtgatcaaagtccctgaagaagacttgggagagcttgaagaagatgaattttattttcatgaaatcatcggctgcgaggttgtgtcagaagacggggaactgatcggcacagtgaaggaaatcttgacgccaggggctaatgacgtatgggtggttgcaagaaaaggcaaaaaagatgcgctcattccgtatattgcttctgtggtaaaggatattaatataaatgagaagaaaattaagattcatgtaatggaagggttaatagacgaatgaaaatcgactttttaacactgtttcccgaaatgtttcaaggggtgctcggctcctccattctgcaaaaagcacaggaaaaagaggctgtccgttttgacgtcatcaatttccgggctttttcggataataaacaccaaacggttgatgattacccgtacggcgggggagccgggatggtgttaaagccgcagcctgtatttgatgcggttgaaaagctgacagccggtacggacgccaagccgcgcattattctcgtctgcccgcaaggtgagcgttatacgcagaagaaagccgaggagctggcacaagaggaacatctcatgtttatttgcggacattatgaagggtatgatgaacggatccgggaacatcttgtcactgatgaaatctccatcggggattttgtgctgaccgggggagagctccctgccatgatgatcgccgacagcgttgtcaggcttttgccgggcgtcctcggaaaagaagcatcccacgtggaggattccttcagcacggggcttttagagcatccgcactatacgaggcctgcagattatagaggcttaaaagtgcctgagacccttctgtcgggcaaccatgcaaaaatacaaaaatggcgcaataaagaatcaatcagaagaacctttttaagacgtccggatcttcttgaaaactatcctctcactgatgagcaaagaaaatggatttccgagtgggaaaacgaatagattctattgcgcaggcgatgaagatatgataagatactacttgtggcttaaggaggcttatccttcagaagcttgaaaacgatgttccgctgtgccttgcagttgtggccaagagcatctgttggaaggagttgaaaacgatgcaaaaactaattcaagatatcacaaaagaacagcttcgcactgatcttcctgcgttccgtcctggtgacactttacgtgtacacgtaaaagttgttgagggtaaccgtgagcgtatccagatcttcgaaggtgttgtgatcaagcgtcgtggtggtggaatcagcgaaacgttcacagttcgtaagatttcttacggtgttggcgttgaacgtacattccctgtacacacaccaaaaatcgcgaaaatcgaagttgtacgttacggtaaagtacgtcgcgctaagctttactacctgcgtgaacttcgcggaaaagcggctcgtattaaagaaatcagacgataatgataacgaacgaaaagagcttgttacccgtaacaggctctttttttatatgaaatttgtaaaagcagaacaagcaacgtaaaatacataagagatcatcggaacatccggttccggtaaataaggcaggtgtcgaagtcacatgaccattcaatggttcccaggccatatggctaaagcgagacgggaagtaacagaaaaactgaaattaattgatatcgtatacgaattggtggatgcgagaatcccgatgtcatcgagaaatccgatgattgaggagattttaaaaaataagccgcgcattatgcttttaaataaagccgataaggcggatgcggctgtgactgcccagtggaaggaccactttcaggaacagggcattccctctctttcaataaactccgttaacgggcagggactgcatcaaatcgtgccgtcctcgaaagagctgctgaaagataagttcgataaaatgaaagcaaaaggtgttaggccaagagcaatccgcgcattaatcatcggcattccgaatgtcggcaagtctacgctcattaaccggctggccaaaaaaaacattgccaagacgggagataggcccggcattaccacttcacagcagtgggtaaaggtaggcaaggaattagagctgctcgatacaccgggaattttatggcctaaatttgaagatgagcttgtcggcttgcgcctggcgatcaccggggcgattaaagatacgattatcaacctgcaggatgtggccgtcttcgggctgcgctttctggaagagcattatcccgaccgcttgaaggagcgctacggacttcaggaaatccctgaggatatcgccgctcttttcgacgcgatcggtgaaaaacgcggctgtttgatgggcggaggaatggttgactatgataaaacaacggaagtcatcattcgggacatccggacggaaaaattcggcaggctttcatttgaaacaccatcagaataaagacgcgcagcgatgcgggtctttattttttccgcagaataccgatatacataatgtaagggagaagagaacgtgaatacattaaccgtaaaaagcgtaaaagaacgcctgcaagaggtcagagacgaaagcgaccccttccttgcccaatgtgagaaagacccgagaaaaagcgtacagacgcttttagagcaatggctgaaaaagcacgcgaaggaaaaagctcttaaagagcaatggctgaacatgacggcatacgaaagactgtcatccaaaaagggcttccgcctgattgcgggtgttgacgaagccggaagagggccgcttgccggaccggttgtcgccggcgccgtcattttgccggcagaatgcgagattctcggtctcacggactcgaagaaattgtcggaaaagaagctcgaggagtattacagccggatcacggaagaagcggcggctgtaggagtcggcattgtccatgcggacgtcattgaccggatcaacatttatgaggccgcgagactggcgatggtaaaagccgtcaatgctttaacggaaacacctgattatctgcttgttgatgccatgacccttccgcttgacattccgcagtcatcagttataaaaggggatgccaaaagcgtgtcaattgccgccggagcctgcatagcaaaagtaacgcgggaccgtctcatggctgagtacgccaaaacctaccccatgtacggctttgaaaaaaataaaggctacggaacgaaagaacatcttgaagctcttcaggcatacggaccgacaactattcaccgaaaaacgttcgctcccgttcaatcttattgttagaaaagaggcttaagacatgaacataagcggcgaaatccaagcggctttcagacagctgacggcggaaatccctccggaccggcaagacggcggtaaagacagcggcgctcaaaggctgctgttagggaaggttctccgtttgctggacgatcaaagcgctcttatccaaatcggcggccggacgatgcagggaaaacttgaaaccgcccttcgtccgcaggcgtattactggttttcttatgacaaacagccggcggaaaaaacgggccggcttcatgtcatcgaccaattcgaaggaaacccgaaaaccgttcaggaagcggcgggaagactgttaaacgctctttccgtcaaaccaggccctgtgtctctgcagattgccgaaacgtttatgcagcagaagctgccgatgacggaaaacagcctcaaagcttgcatccgctgggctgaatcgcttccggccgccgaattgaaaaaagcggcggaaacaatcgtatttgcgctgaaacgggaactgcccgcacatccggaagtcttgtcagccattcatgccgttaaatatccggttccgacccggcgcctcctctcaggactgcttcaggcaatcaatcaggctccgcaatcggcaaaagagctgtctgtgctcaaagaggcggtttctgacgtgttaaacgcggaaacggatcttcatgcagaacgtctcctgaagaagcttgccgaggctgcacgcatgccgctctcagaaaccgggctgatggatgaaggagaacggacggaatcaaagcaatcaccatttgtccgagagactcgtgaaaacggaaaggcagtctcaagccagccttctcctccgagtgcacggacagatacggaactgcctgaaaaaacggcaaaacagattatagagaaattaatgacatcggcagaaaaaactgaaaaccgtcccgtaaaagtaacggcggagatcattaaggctttcatttctcaagaaaaaacatttaaaacagcacctgttcttcaaaacgcacatctgacagaacaggaggcggctgttttcgaaaaagccgctcagctcaccgaattgaaatatgcagaaaaacatgatgtattaagccttttgcagaaaatcaaaaaaggactgggcacacgtgatgaattatcattcattacagcgcttgaaaaaggcgtgtctccgcagccggagaaacaagcgctgaaaacagccctccaagccgtccggacgcttcaagaagcgccccaatccgttaaacaagaggcggaaccgcttattcataaattaaacggccagctgtttattgagcagcataacccttcttttacgcagatggtgctgtcatttccgctgggagcgtccgcgtatgagaatgacatcacagttctctttaaaggacggaagaagccggacggaaaactcgatccgtcacattgcaggctcctgtttttgctgcaccttgaaacactgcaagaaaccgttgtggactgcatgattcagcaaaatgtaatgaccattacggttgagactgattttgagcttcaggcggccatcgaccctctcgtaccggctttaaaagaagccgtaaaagaaacgggcttcagcctgtcaggcgtcacggctaaaaaacggcgcccgaaagaccagagcgctcttgtggaagagtttatagaaaaagacggcggaagaaaagtggatgtgaaaatatgaaagagcaaacgccgttaagaagagctgtcgccctgcattacgaccggcagaaagaccaagccccaaaggttgtcgcaacaggcagggggcacgtggcggaaaatattataaaagaagctgagaaggctggggttcccattcaggaagacagaacccttgtcgaattaatgcgccatttgacggttgacgatcagataccggaggcgctttatgaaaccgttgccgaaattttttcatttgtttacaaactggacgaaaccctgaaaaacgaaaaataaggaccattcatttcccggactccgtttaaatttatattttcaataaaataaaagttagaatgtttggaaggatataaagattttgttttgaaccctagacaattcttccagtattatatagaatgaaagcgcagtctatttttagttttgctacataagttaggaggatgggaaatgaatatccatgagtaccagggaaaagaagtcctcagaaaatacggggtgtctgttcctgaaggtaaagtggcttttacagcagaggaagcagttgaaaaagcagagagcctgtcaagctcggtttatgtcgtaaaggcgcaaatccatgctggcggccgcggcaaagctggtggggtaaagattgcaaaaacaaaagatgaagtgaaagagtatgccgaagaactgttaggtaagacgctcgtcacacatcaaacgggtccggacggacaagtaataaaacgcttacttattgaagaaggctgcgatattaaaaaggaatactatgtcgggcttgtacttgaccgcgctacttcaagaatcgttttaatggcgtctgaagaaggcggaacggagattgaagaagtagcggaaaaaactcctgaaaaaattaaaaaagcggtaattgatccggctgtcggccttcagggctatcaggcaagggaaattgcattcgcaattaacatcccgaaagagcttgtcggcaaagccgctaaatttatgctcggtttatacaaagcatttgttgaaaaggactgctccatcgccgagatcaaccctctcgtcgttacgggggacggaaacgtcatggcgctggatgctaagctgaacttcgacagcaatgcgttatacagacaaaaagacattatggaatacagagatttagatgaagaagatccgaaagaaatcgaagcgtcaaaatacgatttaagctacatttcccttgatggaaatatcggctgtatggtaaacggcgcgggtcttgcaatgtctacaatggatatcattaaacactacggcggagaacctgcaaacttccttgatgtcgggggcggcgcaaccgcagaaaaagttacggaagcttttaaaatcattctttccgatcaaaacgtaaaaggaattttcgtcaatattttcggaggcatcatgaagtgcgatgtcatcgccgagggcgttgttgaagccacgagacaagtcggcttgacattgccgctggtcgtgcgccttgaagggacaaacgtagatttaggaaagaaaatcctgaatgaatcaggcttaaacatcacatctgcggaatcaatggcagacggcgcacagaaaatcgtatccttagtttaggaaagaatgaaaggcaggggaccagataatgagtgtttttatcaataaagatacaagagttattgtacaggggattacaggttctaccgctttatttcatacaaagcagatgctggaatacggcacgaatatcgttggcggtgtaacacctggaaaaggcggaacggaagcggaaggcgtaccggtattcaatacggtcgcagaagcggttcatacaacgggcgcagatgcgtcagttatttacgtgccggctccgtttgcggcggacgcaattatggaagcggttgacgcggaaattgatcttgtcatttgtatcactgagcacattccggttttggacatggtgaaagtgaagcgttttatggaaggcaagaaaacgagattaatagggccgaattgccctggtgttattacacctgaagaatgcaagatcggcattatgccgggatacattcataaaaagggtcatgtaggcgttgtgtcccgttcaggaacattgacatacgaggccgtccatcagctttcagaagccggcgtaggccaatctaccgctgtagggatcggcggcgatccggtcaacggcacgaactttattgacgtgttaaaagcgttcaatgaagatcctgaaacacatgccgtcatcatgatcggagaaatcggcggcacagctgaagaagaagcggctgagtgggtgaaagcgaacatgacgaagcctgttgtcggctttatcggcggtaaaaccgcgcctccgggaaaacgcatgggccatgcgggcgccatcatctccggaggaaaaggcacggcagaagaaaaagtcaaaacgatgaacgcctgcggaattgaagtcgcggaaaccccttctgtaatgggtgaaacgctgattaaggtgttaaaagaaaaaggcttatttgaaacgtgcaaaacgcactgatcgaagcaggggcagccgtaacggctgttcctgtttttgctgaaaaaaagaggaggtttccagatttggatcaagcatcgcgctgtttaatggtctgcagtattaatcaaatcatttccccgtctcttctattaaaatggtggaaagctgatcactctctgtcttttttaccgaatccgcatccattaactgttttatcagaagggaaaacagccccggaagcaatttttcgggaaatagagcgcaagaattcggaacttgatgaagttctgtccgattaccgccgcgaaggcattactgtcattccgatttcatcaagccgctatccaacatggcttaaagcgatttatgatccgccggctgtcttgtatgcaaaagggaacacgctgcttcttgaaaaaggcagaaaaatcgggattgtaggaacgcggaaaccgacggaagacggaataaaagcggttgggcatctttccgccgaactctcaaaaaaaggctggatcattgtaagcgggcttgcatccggtatagacggattgtctcataaggcgagcatcagggcaaaagggcttacgatcggcgtgatagccggcggattccatcacatctatccccgggaaaatctcctgttagcagaatacatggctgaacaccatctcctactctcagaacatcctcctgaaacaaagccgaaaaaatggcactttccgatgagaaaccgcataatcagcggactaagtgaaggaattgtggtcgtgcagggaaaagaaaaaagcggttcattaatcacagcttaccaggctctcgatcaaggcagagaggtatttgccgttccgggttccatatttaatccatattccggaggacctataaaactcattcaagaaggggcgaaagctgtattatgcgcagaggatattgacggagagctgaccgcccgatgcgttcagtatacggaacccttttgaaatatcgtttgacaaacggtattgtaatatttaataatagtgaggatttaaagttgcacattattttcatgtataaaatgacgttcatcataaagaatgaaatgttgaaagccataaaaaggcagctctaaaatgaattgatacttgaaaagagagagaacacctcttgagggggatgaaaatgtctgattatctagtcatcgtggaatcgccggcaaaggcgaaaacgattgaacgttatttagggaagaaatataaagtcaaagcttcaatgggacatgtccgggatcttccgaaaagtcaaatgggagttgacatcgaacagaactttgaaccgaaatatattacgatccgcggaaaaggccctgttttaaaagaattaaaaacagcggcaaagaaagcaaaaaaagtctatctcgcggccgaccccgacagagaaggggaagcgattgcatggcatctcgcacacagtcttgatctggatctcagctcggactgccgggtcgtctttaatgaaataacgaaagacgccattaaagaatcatttaaacatccgcgcatgattaatatggatcttgtcgatgcgcagcaggcgcgccgcatactagacagactcgtcggatacaaaatcagcccgattctttggaaaaaagtaaaaaaaggcctcagtgcgggccgtgtgcaatccgttgcgctccggctgatcatcgaccgggaaaaggaaatcaacgattttaaacctgaagagtactggacgattaccggctcatttttaaaaggaaaagagacgtttgaagccggatttttcggaaaaaacggcaaaaagcttcctttaaaaagcgaagaagacgtaaaagccatccttgctcagctgaaaggcaataagtatacagttgacaaggttacgaaaaaagagcgcaaacgaaatcccgctctgccgtttacaacgtccactctgcagcaggaggctgcaagaaagctgaatttcagagcgaagaaaacgatgatgatcgcgcagcaattatatgaaggaattgatctcggcaaagaagggacagtcgggctcatcacgtatatgagaacggactcaacgcggatttccaatacagccgttgaagaagcgtcagcttttattgatcaggcgtacggaaaagagtacttagcgggaaaacggaaaccggcaaagaaaaatgaaaacgcacaagatgcccacgaagcgatccgcccgacttcggtgctcagaaaacctgccgacttaaaagcggtgcttggaagagaccagctcagattatacaagctgatttgggagcgctttgttgcaagccagatggcccctgccgtccttgatacgatgagcgtcgatctcagcaataacggattgacattccgggcaaacggaagtaaagtcaaattcgccggcttcatgaaagtctatgtagagggtaaagacgatcagctggaagaaaaagaccgcatgcttccggaccttaaagagggagacacggttttatcgaaagatattgagcctgagcagcactttactcagccgcctccgcgttatacagaggcgcgcctggttaaaacgcttgaagaactggggatcggccgtccttcgacatatgcgccgactcttgacaccatccagcgccgcggttacgtgggattagacaataaacggtttgtgccgactgagcttgggcagatcgtgctggatcttatcatggagtttttcccggaaatcattaacgttgaattcacggctaaaatggaaagagaccttgatcatgttgaagatggccagacagaatgggttcaaatcattgacagcttctatactgatttcgaaaaacgcgtgaaaaaagcggaagccgaaatgaaagaagtggaaattgaacctgaatacgccgatgaagattgtgagttatgcggctcccggatggtttataaaatgggccgatacggcaaatttatggcgtgctccaatttccctgactgccggaatacaaaaccgattgtcaaacaaatcggcgtaaaatgccctaagtgccatgaaggaaacattgtcgaacgaaaatcaaaaaagaaacgcatcttttacggctgtgaccgttatcctgaatgcgacttcgtatcttgggacaaaccgattgaacgaaaatgcccgaaatgtgaaaatatgctcgtagagaaaaagcttaaaaaaggcatacaagtccaatgcgtcgaatgcgattataaggaagaaccacagaagtagcggtgagcagagccttgctcaccttctttgtgtggaagggacaaacaacaggagatgaaaagaaatgaaccagcaaacagttaatgtaatcggagcaggccttgccggaagtgaagcggcatggcagcttgcaaaacgaggaattcaagtgaaactatatgaaatgcggcccgtcaggcagacggcagcccatcatactgataaattcgccgaactggtatgcagcaactccctccgttcaaatacactcgccaatgcggtaggcgtattaaaagaagaaatgcgggcccttgactcggcaatcattcaatctgctgataaatgctcggttccggccgggggagcgcttgccgttgaccgtcatgaatttgcgcaaagcgtgacggatctcgtgaaaaaccatccgaacgtaacggttcttactgaggaagtaacagagattccggaaggcccgactgttatcgcgaccggaccgcttacgtcagaatcgctttcacagcagctgaaagagctcacgggagaagagtatctgtatttttatgacgcggcggcgccgattgtcgaaaaagacagcctcgatatggagaaagtgtacttaaaatcccgttatgacaagggagaagcggcgtacttaaactgcccgatgacagaggaagagttcgaccgtttctatgaagcattgacgacggctgagacggtacctttaaaagaattcgagaaagaaatcttctttgaaggctgcatgccgattgaagtcatggcgaaaagaggcaagaaaacaatgctgttcggaccgatgaaaccggtcggactggaagatccgaaaacaggcaagcgcccttatgcagtcgttcagctcagacaggatgatgcggcgggaacgctttataatattgtaggttttcagacacatttaaaatggggagaccaaaaagaagtgcttaaactgatccccggtcttgaaaatgttgatatcgtcagatacggcgtcatgcacagaaacacatttatcaactcgccgagccttttgaacccgacatatcaatttaaacagcggaacgatctgtttttcgcgggccaaatgaccggcgtagagggttatgttgaatctgccgcttcaggtcttgtagcgggaatcaatgccgccaaacttgtgctcggtcaggatcttgtgacattcccgcaggagacggcgatcggaagcatggctcactacattacgacgacaaatcagaagaacttccagccgatgaatgcaaacttcggcctcttaaaagaattgcctgtaaaaattaaaaacaaaaaagaacgaaatgaagaatacgctaaacgcgcaattgagactattcaaactatttcgaaaacgatatagcttttcattgcaacttcgatgcattatatgataccatttaaaagcccttcggagagggaggtcttcataatgactgagaatgttaacttttttttaaagttattcgttgaatatttacaaattgaaaaaaattattcacaatatactattgtgaattatgttaattcgattgaagaatttgggatgtttctgcatgctcaaaatataaatggaatgaaagaagctgcatatcatgatgtgagaatatttttgacggaggcttatgaaaaaggcctgtcaagaaaaacaatcagcaagaaaatttcagctttgagaagcttctataaatttttaatgagggaaaagcttgttgaagagaatccgtttcagcttgttcatctgccgaaacaagagaaacggattccgaagtttctttatgaaaaagaacttgaggaactattcgctgtttcagacagaagtcagccgtcagggatgcgcgatcaggccctgcttgagcttctttatgcgaccggaatgagggtcagtgagtgctgtacgctcactgtcggcgatcttgacctgttcatggatacggtgctcgttcacgggaaaggcaagaagcagcgctatatcccgttcggctcatatgcccgtgatgcgctggagctgtatatcaacagcggaaggcagtgcctgcttgaaaaagcaaaagagcctcatgatgtgctgtttgtcaatcaaagaggcggcccgctgaccgccagaggaatccggtatattttaagcgggcttgtaaaaaaagcatccggcactttacatatacacccgcatatgcttcggcacacgtttgcgactcatctgctgaatgaaggggctgatttaagaagcgtccaggagcttttgggccattccaatctgtcttctacgcagatttacacgcatgtatcgaaggaaatgctgagaaacacatatatgtcccaccacccgagagcttttaaagaaaattaaaaggaggcccttctcatgtcatcttttcatgcgacaacgatttttgccgtccagcataacgggaaaagcgctatgtcaggagacggccaggtcacattcggtcaggctgtagtcatgaaacataccgcgagaaaagtgagaaagctgtttaacggaaaggttctggccggatttgcgggatctgttgcagacgctttcacactttttgaaatgtttgaggcgaagcttgaagaatacaacggcaatttaaaacgtgcgtcggttgagcttgcgaaagaatggcgcagcgataaagtgctgcgcaagctggaagccatgctgattgtcatgaaccaggataccttgcttctcgtatcgggaacaggtgaagtgattgagccggatgacggcattttggcaatcggctccggcggaaactacgccctgtcagcaggaagagcgctgaaaacctatgccggagagaatctgtccgccaaagatattgcaaaagccgctttgaaaatcgcgggcgagatttgtgtgtacacaaacgatcagatcattttggaagaacttgaatagaaaggacttgaggcgcatggaaaacaaaccgttaacaccgagacaaatcgtagatcggttggatcaatacattgtaggacagcaggatgcgaaaaaagctgtcgccgtggcattaagaaaccgctatcgcagaagtcttcttgatgaaaaactgagagacgagatcgttcccaaaaacatcctgatgatgggcccgaccggggtggggaaaacagagatcgccagacggatcgccaagcttaccggtgcgccatttataaaaattgaagcgacaaaatttacagaagtcggctatgtaggcagagatgtcgaatcaatggtcagagacctcgttgagacatccgtgcggctcattaaagaagaaaaaatcagcgaagtgaaagaacaggctgaagaaaatgcaaacaaacgtatagtgcggcttctcgttcctggaaagaaaaaacaagcgggtgtgaaaaatccgtttgaaatgcttttcggaggaaaccaggcggcaaatgatgatgaagccgaccagcaggaagaagcaagccttgaagagaaaagaaagcgcatggcgcatcagctcgcattgggagagctcgaagaccattacgtctccgtagaggtggaagagcagcagccgtcgatgtttgacatgctgcaaggctccgggatggagcagatgggcatgaatatgcaggatgcgctgagcaatctggtgccaaaaaagaaaaaacgccgcaaaatgacggtcagagaagcaaggaaggttctgaccaatgaagaggcaggcaaattaatcgatatggatgaagtcggccaagaggccgtgttaagagctgaagagggcggcattatcttcattgacgaaatagataaaatcgcaaaaaacggaggggcttcttcctcagcagatgtatcgagagaaggcgttcaaagagatatccttccgattgtcgaaggatctaccgtcgtcacgaaatacggctccgtcaaaacagatcacgtgctgtttatcgcagccggggcattccatatggccaaaccgtctgatctgattccggagctgcagggccgctttccgattcgtgtagaattgagcaagctgacggtagatgattttgtgaaaattctcgtcgaacccgataacgcgctgttaaaacaatatcaggctttattgcagacagaaggtatatctcttgaattttctgacgaagctattcgtaagatcgccgaagtggcttatcatgtgaatcaggatacggacaacatcggagcgagaaggcttcacacgatattggaacgtctcttggaagacctgtcgtttgaagcgccggacgtgacgatggaaaaagtagccatcacgccgcaatacgttgaagaaaagctcggaacgattgcaaacaacaaagatctaagtcaatttatattgtgaaaatttaataagaggaattctaggaggattatttatcatggctttactacaaaaaacacgaattattaacagcatgctgcaggctgcggcaggcaaacccgtaaactttaaagaaatggctgaaacgcttcgtgacgtcattgattctaatattttcgtcgtcagccgcagaggaaagcttttgggctactctattaatcagcagattgaaaatgaccgcatgaaaaaaatgcttgaagaccgccagttcccggaagagtacacgagaaatctgttcaatgttccggagacgtcttcaaaccttgatatcaacagcgaatacacggcgtttcctgtagaaaacagagacctgttccaagcgggcttaacaacgatcgtgccgatcatcggcggaggagagagactgggcacgctcattctgtcccgtctgcaggatcaatttgaagatgatgatctcattcttgctgaatacggagcaaccgttgtaggaatggagattttaagagaaaaagcggaagaaatcgaagaagaggcgcgaagcaaagcggttgttcaaatggcgatcagttctctgtcttacagtgaacttgaagcgattgagcatatctttgaagagcttgatggaaacgaaggcttgcttgtggcaagtaagattgcggaccgtgtcggcattacgcgttcagtaatcgttaacgcgctgagaaagctggaaagcgcaggcgtcattgaatccagatcactgggaatgaaggggacgtacattaaagttctgaacaacaaattccttattgaattggaaaaccttaaatctcattaaggcaaaagcaggatccctaaaaatgggggttctgctttttttatggacaataggtgaaaagttgcagtttaaagttgcttattggaatctgatctgagataatccatcttgctgtgtgaaaaaaggaggaagaaacagaaattgtgctattttcagtcttatattaaacaaatccttgtagtacaaatattctaggacttaatacctacatgcaaaatagatataattgagcacttttttttagcctaacttcatagactttaagcctgttatttcttacaataagcatatggttttacaattctcgacaagggtttttaggagaaaaatatctgaaatggaggtaagtggatttggacttattttctggaactatacaaaatcttgagaatgccttggggagagcggacattaagcaaaaagtcttaactaataatatcgccaatatagatacaccgaactataaggcaaaaaaagtctctttccgaaatttgttatatcaggaaacatccaatcttgaggctgtaaaaaccgactatcggcacgttgactttacgggttcgggggacgattattctatcgtgtccagcagtgatacatcgtaccagcaaaacggaaacaatgtcgatatcgacaaagaaatgacagatttagccgaaaaccaaattaattatcaggctttggttgaaagaatgagcggcaaattcaattctctgaaaaccgtcttgacaggaggaaaataatgagtggctttcaaagcttaaatatttcgggttccgctttaactgcacagcgtgtccggatggacgtcgtatcgtccaacctggccaatatggatacaacgagagcgaagcaggtaaatggcgaatgggtgccttacagaagaaagctggtatctctccaatccggaggcgaatcattttcgtcccttttacattccaagatgaacggaacaggaagcgcgggaagtggcgtaaaggtatctggtgttacggaagacccgaccgcttttaatctcgtttatgatccggagaatcctgatgcgaataaagacggatatgtacaaaaaccaaatgtagatccattaaaggaaatggtggatcttgtcagcagctcgagatcatatgaagcaaacgtaactgcattaaacgcctccaaaggcatgcttttgaaggcgttagaaatcggaaagtaaggtgatgtaagtggttaacgctattactccttttcagcttcaacaaacccaaaatactcaaaacgtaacgaatcaattaaaccaaactcaaaaaactgattcttcaaaccaaacaagcttttcggagcttttaaaaaactctattgattcgttaaatgagtcacaagtgaaatctgaccaaataacgaacgaactggctgcaggaaaggatgtaaaccttgacgaggtcatgatcgctgcccaaaaagcaaatatttctctgacggccgctaccgaattccgcaataaagccgtggaagcctatcaggaaatcatgagaatgcagatgtagtggtcagattgaagagaatgactggaatgaccgggggttaacatgaatcgtactctaatgcaaatgaaaaccaaaacggcagcgttttggaacaacagatcaaaaacacagaagatactcatggtaagcggcttggccgcattcattattttactcatcgtcgttattatttttacttcgtctgaaaagatggtgcctctttataaagatttgtccgcggaagaagcggggaagattaaagaagagctcgatacgaaaaaggtgtcttctgaacttgctgacggcggcacggtcattaaggttcctgagagccaagtggattcgcttaaagtccagcttgccgcggaaggcctgccgaaaacgggatcaattgattattcgtttttcggacaaaatgcgggcttcggcctgacggataatgagtttgacgttttaaaggttgaggcgactcagaccgaattgtcaaacctgataaatgaaatggacggtattaaaagctcgaaggtcatgatcaacatgccgaaagaagccgtgttcgtcggtgaagatcagccggcagcgtccgcttcaatcgttttgcagattaaaccgggctactcgcttgatcaaaaccagatcaacgggctgtaccatctcgtttctaaaagtgttccgaacttaaaagaagataatatcgtcataatggatcaaaattctacatattatgacaaaagtgacagcggtgcagggtccgtttctgacagttatgcttctcagcaaggtattaagtcgcaggtcgaaaaggacattcaaaaacatgttcagtcactgctcggcacaatgatggggcaggataaggtcgttgtttccgtgacggcggatgttgacttcacgaaggaaaaacgcactgaagacactgtcgaacctgtcgataaagataacatggaaggcatagcggtaagcgccgaaaaagttgcggaaacgtataaaggcgacggcgcggccaacggcggcacggccggaacgggaagcaatgacaccgcgaactatgccgagacaaacggcggttcaaacagcggggactacgaaaaaagcagcaataaaatcaactatgaagtcaaccgcattcataaagaaatcgctgaaagcccgtataaagtgcgtgatttaggcattcaggtcatggtggagccgcctaatccgaaaaatgccgcttccttatcagcacagagacaggctgatatacagaagattttaggaacggtcgtcagaacgtctcttgataaaaacgaaacgcaaaatcaaaacctgacagacaatgatatcaacaataaaatcgttgtatccgttcagccgtttgacggaaaaacaagcctgaacacagattcggcacaatcttcaggtcttccgatctgggtatacattacaggcggcgtactgcttgcggccattattctgcttattattctcctcatcagaaagaaacgctcacaagaggatgaatacgaagaatatgaatatgaaacaccgcccgagccggttcgattgcctgatatcaacgaagagaaaattgaaacggaagaaacagtcagacgaaaacagcttgaaaaaatggctaaagaaaaaccggaagactttgctaaattgcttcgaagctggctggacgaggattagggggaatggaaaatggcgaaacgtgatcagaacaagcttacaggaaaacaaaaagcagccatcctcatgatttccttaggccttgatgtatcagcttctgtgtacaagcatttgtctgaagaagaaattgaaagattgacactcgagatttcgggagtcagaagcgtcgatcatcaaagaaaagatgaaatcattgaagaatttcataatatcgcaatcgctcaggactatatttcacaaggcggtttaaattacgcccgccaagtgcttgaaaaagcgctcggagaagacaaagcggtaagcattttaaacaggctcacctcttctttgcaggtaaagccgtttgatttcgcgagaaaagcggagcccgaacagattttaaatttcattcagcaggaacatccgcaaacgatggcgctgattttatcctaccttgacccggtgcaggccggacagattttgtctgagctgaacccggacgttcaggctgaggtggcaagaaggattgcggttatggacagaacgtctcctgaaatcataaatgaagtggagcgggtccttgaacaaaagctgtcctcctcctttacgcaggattatacgcagaccggcggcatagaagccgttgttgaagtgttaaacggcgtagacagaggaacggaaaaaacgatccttgattcattggaaatccaagatcctgaattggcggatgaaatcaaaaaacggatgtttgtctttgaagatattgtcacccttgataaccgtgcgattcagcgcgtgatcagagatgttgaaaacgacgacctcctgctttcattgaaggttgcgagcgaggaagtcaaagagatcgtcttcagcaatatgtcacagcgtatggttgaaacgtttaaagaggaaatggaaattatggggcctgtgcgtttgcgtgatgtagaagaggcgcaatcaagaatcgtgggcgtcgtccgcaagctggaagaagccggagaaattgtaatcgcgcgaggcggaggagacgatattattgtctaatatcattaaacagcaatcaccattttctcctgaacaaaaacggcgcaagctttccttgcaggaagtcaggaaatcacattcccatccagaccgggaggaacccgaaaatccggaggctctcatggcctttgccaaggccgaagccgacagggtgtctgaagaagcgaaaaatcaattagagcacactcttctgcagattgaagaagagaaaaaccgctgggcggaagaaaaacaaagattgatagaagaagcaaaggcagaaggatataaagaaggcatggcattgggaaaagccgaggctcaagctgaatacgctaatctcatcagccgggccaatgccgttatggaaatggcgagacagtcagtcgaggaaaaactggaaagcgctgaggaagagattattgagctttccgttgcgctcgctaaaaaagtatggcggcaaaaaagtgatgataaagaggctttccttctgctggtcaaacaggtagtagccgaagtaaaagattatgatgacatctccatctatgtggaccctgaatattatgagacggttcatcagcatatggacgaaattcagcagctgttatacaaagaatgcagattaagcttatatgccgatgaaaaagccgcaaagggaacgtgctcgatagaaactccgttcggacgtgttgatgcaggcatagacacccagctgatgcaattaaagcaaaaacttttaacggcgcttgaggcgggagcggagcaatgaagacacagtatttaatagactcaattgaaacagcggatccgtacaaacgctacggcaaggttaaacgggtcatcgggctgatgattgaatcaaaagggcccgaaagctcaatcggagatgtttgtctcatttatccgaaaggccatgcgagaaaagcgattaaagctgaggttgtaggcttccaagatgaaaacattctgttaatgccttatctggaagcggccagcatcgcgccgggcagcattgtggaggccactggcgagtcgctccgcatcaaagtaggcgcgggtttaatcggacaagttgtcgacgcgttcggcgagcctcttgacggccgggcgcttccgaaaggtttgtcccccgtttcgacggaacagccgccgccaaacccgatgaaacgcccgccgatacgggaaaagatgggtgtcggcgtcagatcgattgacagtctgctgacggtaggaaaagggcagagaatcgggatttttgccggaagcggagtcggaaaaagcaccctgatgggaatgatcgcgaagcagactgaagctgatttaaacattatcgcactcgtcggtgaacgggggcgcgaggtgcgtgaattcatcgagaaggatttaggcgaagaaggcctgaaacgctcgatagtcgtagtcgcgacctctgatcagcctgccttaatgcgtttgaaagcggcgtatacggccaccgccattgcggagtatttccgcgataaaggccggaatgtgatgttcatgatggactccgtcacgagggtcgcgatggctcagcgggaaatcggcctggcagcgggagaaccgccgacaacaaaaggatatacaccttctgtgttcgctattttgccccgtttgctggaaagaacgggcgcgaatgaacaaggaacgataaccgctttttatacggttctcgtagacggagatgacatgaacgaaccgattgccgatacggtgcgcggaatattagacgggcatatcgttctcgatcgggcgcttgccaacaaagggcagttcccggccgtgaacatcctgaaaagcatcagcagggtcatgtctaatatttcagacacagcgcacaaagaggcggccaacaaattccgcgatcttctgtcaacttatcaaaactctgaagatctcattaatatcggagcttacaaaagaggatcatcaagagaaattgatgaagcgattcagttttatccgcagcttattcaatttttaaaacaaggaacggaagaacctgctcaattggaagacagcattgcggcattgacgagtctgacaggaaaagaggaataaacatcgtggcataccaattcagatttcaaaagctgctggaattaaaagaaaatgaaaaagaccaaacattgactgaatacagacaatcggtttctgaatttgagacagtggctgaaaaactatatgaaaatatgagcaaaaaagaattgctcgaaaaagacaaagaatcaaagctgaaatgcgggatgagcgttcaggaaatgagacattatcagcaattcgtttccaatcttgagaacacaatctatcattatcaaaagcttgtcatcatgaaacgaaatgaaatgaatgagaagcaggaacagctcaccgaaaaaaacattgaagtaaagaaatttgaaaaaatgcgggaaaaacaatttaatatgttcgcacttgaagacaaagctgcagagatgagggaaatggacgacatttcaatcaagcagtttatgattcaggggcattaggagcgaatgaaatggccgataaagaaaagagatctggaaagttcggttcaatcctgctttttatcatgatcccgttgatttttctgatcatcgtcgcaagcatcatcctttgggctgccggcgttgatgtgatgaagccgattcaggaaacagccgctaaaacgcctgttttaaaagaattggttcccgaaacgaaagaaatgaaaagcgcggcggaaaagcagaaggcagacagaacggcttctcttgaaaagaccataaaggaacaaaaaagtgaaattaacattttgaataaagatttagacacaagcaagtccgaaatcgataatctgaatcagaaaatccgttcactgaaacaggaagctgaacagcagcagaaaacgaagacggatgaaacgaaaaaagacgctgcggattcagccggaaaagataaaatgatcaacatctataaaagtatggacggcggtaaagcggcaagcattatcgtaaagctgaaagaaaaagaagccctcgatattttaaacggattaagtaaaaagcagcttgctgaaatcttgacgaaaatgactcctgaacaagcggctaaatatacagaaaaactatccgctgacggaaataaggagtgatgtaagttgaagctgcttgaattaacgggtaatcgtacgcagactgtgcaaaacagcaatgtgaagatgaatgtaaacagcttaggtctatttcagaactggctcctgtcggaaatcacttctccccggcagcccggagatgaaaccaaaacaagtgacgctgagctgaatgatgccctatcgaaaatcggtgattggctgaaagccggcccggaagataaagagttgcagctaaaacagctgcttgaggcggtaaaagctcttgaaggaaagcagacggctgaaacagctcttcctttattgaaacagcttgccgaatctgttgaagacatgttagcgggcaaacagcatggggcgaagcctgaaacggatgagccggattcttccgcaaaagacggggattccgtcaaggatgcgcttgagaagggcctgcttttcattcaagaagccgtatcccagctcttcacatctcagcaggaactgccggacagcgcgcaggcaaaggcggtttaccaggaaggcgcccgtttattagaggcattgaaaaaacaaggtgtcccagaccgcgtgattcaagacctgcggcagacattttttccgaaaaacgaatctgcatctaaactttactccatgacagccgctgagctgaagagctttcaaagcgtcgcggagcagcttgcgggcctttctcaaaagggaacaaaggaatgggatatggctgaaactgagctgaaagcttttgtgttatctcaatcatctgaatcatcccaagagtcagccgggaaaacagaacagcaaaacggcggcacggttactcacgcaaaggcgcctgacagcaaattgtctgcacatatactgttttcgggaacgagaagccttgccggcattcagcaaacgtccgcaggagctgaacagcagccggcagaaaataaaccgttaacggatcaggtcataagcggctggaaacagatgaaatacacgcctttcgggaaaacaaccggaagctttacgattcgtcttaatcccgagaacctcggatttgtcacaattaaggtgacaaacgaaaacgggatgtttcaaagcaaaataatcgcatccagccagtccgcgaaagagctgctggaacagcatcttcctcagctgaaacagtcgcttccgaatatggcggtccaagtcgaccgttttacagtcccccttcaaagcggggatcagcagcctgtttacgggcagacggccgatcacaataaacagcagcatcagggacagagagagcagaagaaccagcagcagtcaggcgatttcggagatatgctggaggagctttctctcaatgaaatggaggaagaatagttgacatcagtaaactcggattatgccgcggcgggcgcttcaaccacttcaagcgcgaagagcacctccgcagtaaacagcagcacgaatttagggaaagacgaatttctgaagatcttaatgacacaggttcaaaatcaggacccgctcaatccggttgatgacaaagaattcatcagccagatggcgacattttcttcattggagcaaatgatgaatatgaatacgacgatgactaaatttgtagaaaatcaagatccgtttacgatgtatgtgaactggatcggcaaaaatgtcacattcagcgacagcgacgggaaggatcagacaagcccagtcaattcagtcaagcattcaaacggcaattacgtgctcgtgcttgaaaatggcaaagaggtcagtccgtggaatgtcacggccgtcagcgaaacatctaaataaaaagaaacccagggggaatttaacatgttacgttcattatattccggtatcagcggcatgaaaaactttcagacaaaactagatgtaatcggcaataacatcgccaacgtcaacacagtgggatttaagaaaagccgcgttacatttaaagatatgatcagccagacagtcgccggcggttcaaacgtgaccaattcaaaacaaattggcttaggtgccgcgacttcttccattgatgtcgttcattcaaccggcgccccgcaggctacacagaataaaaccgacctagccattgacggagacggctactttcagattaatacaggtgcgggaattgtttacacacgtgcggggaatttcggaaaggacaatcaagggaaccttgttacgactgacgggtactatcttgaaaaaatcggcggcggcaaaatcaatattccgactgatgcgaaagattacagcatcggtgcagacggaaccgttacatacactgatgcaggggatgaggttcatgatgccggacaaatcggtctggtcacgttccctaacagcgccggtctggaaaaaatcggaggaaacctttacagagaatcattaagttcaggagctgcaagcgcagtcaccactccgggcgaaaacggaacgggtaagcttttggcaggctatcttgaaatgtcaaacgtagatctgacagatgaatttaccgaaatgatcgttgctcaacggggtttccaatcaaactcaaaaatcattacgacttcagatgaaatccttcaggagctggttaatctgaaacggtaaggagggaggagaggcggttaggccgcttctccggattgcatgattcaagtcacccgtttaaacggccagccttttacgctgaacgcgctgtttatcgaacagattgagtgcttccccgacacgacgattacactgtccaacggcaaaaagttcgtagtgaaagaaccggaagaagcagttctcaaaaaagtcatatcgttttaccatagcatacaaatattttcactggatcagggaatagaggaagaagaatgaagaaaaaattagtcatcattttgctgattattttaattgtcatcgccggcctcggaacggcagcatattttgtcgtcagcggacattccggcaaagacaaaaagccgacaattgacgaagtcgttgcagccactgtgtctgtcgacgatattacgacaaacttaaagtctgacagcatcatccgtatcggcatcaagcttgaaaccgactcggctaaagcgaaggaagaacttgaaaaacgcgattttcaggtgaaagacaacatcatttccattttagccggcacaagcgccggagagattgagggagataaaggaagagaagcgtttaaacaatcattaaaagagaaagtaaacagctatctccaagaaggaaaagttcagaaagtgtacattacctcctttaatctgcaataaaaacaaatttgacagaatacggaggtgaagaaaatgtcaggagaagttctctcccaaaatgaaatagacgcactgctttccgccatttccacgggtgaggcggatgcggaagagctgaaaaaggaagttaaagagaaaaaagtaaaggtatatgattttaaacgggctctcagattctcgaaagatcagatacgcagtttaacccggatacatgataactttgcgaggcttctcacaacacacttttccgccaagctcagaacgtatattcatatatccgtcagctcagttgaccaggtgccgtatgaagaatttatccgttccataccgaacatgacgattttaaatttattcgatgttcatccgatggaaggcagaatcatgatggaggttaatcccaccatcgcatacgcaatgcttgaccgcgtcatgggaggcatcggcatcactcataacaaagctgacagccttacggaaattgaaacgaatattatttctaacttatttgaaaatgcactgggcaactacaaagaagcgtggcaatcgattgctgatattgaccctgaaatgactgaatttgaagtgaatcctcagtttgtacagatggtttccccaaatgaaacagtcgttgtcatttctctcaatacgcagataggtgaaatcagcggtgtcattaatctttgtattccccatgtcgtacttgagccgattatccctaagctttccgtacattattggatgcaatcagaccggaatgaagcgaagcccgaagaaacgaagttgcttgaaaagcgcatcatgacggctcaaattcccgttgtggctctcttgggcgcttctgaactgacaatagaagaatttttaagtttggaagtcggggactgtataactctggacaaatcagtgactgatcctcttactgtattggtcggaaacaaaccgaagtttttagggcaggccggccgggtgaatcgaagacaggcagtgcaaattttagatcacgacataagaggtgaacaagatgaacaatagattatctcaagatgaaatcgatgctcttcttaacggcacaaacagtcactcagaggatacagaacagcctcaaggggcgaacttgtctgaacttgagcgcgatgcgatcggagaaatcgggaatatttcgttcggcagctcggctacggcgctgtccactcttttaaatcaaaaagtggacattacgacaccgagtgtgaccgtcatttcaaaaagcaaaatcagtgatgaatttcctcatccgtatgttgccattgaagtgaactacacagaaggctttgacggcagcaatttgctcgtcgtcgaacaaagcgacgcggccatcatcgcagatttgatgatcggcggggacggccggggcgccgatccgtcactcggtgaaattcacctgagcgccgtgcaggaagcaatgaatcaaatgatgggctcggctgctacgtcaatgtcgaccgtgttcagtaaaaaaattgacatttctccgccaagggttgaacttctggatgtgacggaagaaaaagggactgacagaatacctgaggatgacctgctcgtaaaagtgtcattccgtctgaaagtcggcgaattaatcgattcgagtatcatgcagctttatccgattacgtttgcgaaagatctgatcgcagacctgatgactgcagaccagcatgagtcagaggccgcagaaaccgtatcagaaccacaggaaacatacgaaacgccgcagccggaaccgcaggcaaaacccgagcttccgaagagacagggaaccgcaaaaaaagctgctcctgttcaagtcgctccggtagaattccaggcgtttgatcataacgaagcggcgcaaggatcaaggaataaccttgatatgctgatggatattccgctttccgttacggttgagctcggcagaacgaagagaagcgtcaaagaaatccttgaactttctgcgggaagcattattgagcttgacaagctggctggtgaacctgttgacatcctggtcaaccagcggatcgtggcaaagggcgaggtcgttgtcatagaagaaaacttcggcgtgagagtcactgatattttaagtcaggcagaccgccttaacaatttaaaataagcgaacatagaggagagaaacagattatggcacacagaattttaattgtagacgatgcagcatttatgagaatgatgatcaaggatattttagtgaagaacggttttgacgttgtagctgaagcttcagacggagcgcaggcagtcgaaaaattcaaagagcattcccccgaccttgtgacaatggatattacaatgcctgaaatggacgggattacagctttaaaggaaattaaacaaatcgatccgcaggcgaaaatcatcatgtgttcggctatgggccagcagtcaatggttattgacgcgattcaagccggcgcaaaagactttatcgtgaaaccgttccaagcggaccgcgtgcttgaagctattaataaaacattaagctaaagggtgtacgactgttgaaaaagagtcatggtttactagctttgatttgttgtttcgttttactcaatgtacatccgttccctgcttttgcggcggagtctgacaattccaccgtcaacgaatggtttgacaaacaatcaacaaacaaaacagagaaaaaaagcgatacatcgaaacaaacggctgatcaagagataggggatgcttctgcatcttctgtctccgcttttgattttgtaaagatgattggggcgttattattcgtcattctgctgatctatggatttgtcaaactgatgaatagaagaaaccgtctgctgaagccatttcaatatgtagaaaatatcggcggaacgtcagtcggccaaaaccgttccgtgcagctgattaaagtgggaaacagcgttctcgtagtcggtgtgggcgaaacgatacagcttttaaaagaaattgaagatgaaaaagagcgcgaggcgattctgagccaatacgaagagtcgatgtcttcaaaagtggaatggaccaagctcgtaaatccgcgtaaggatggagaaaaaaagccgcaaacgatgcttccgtcgttttcaaaagcgctgaaagaacagctgaacgagctgaaacaaagccgttctgaaggaaagaagaaaggcccttatcatcatgaatgaatttattaatctttttaattctagcagtccgaccgaagtcagctccactgttaaattactgctgcttttgactgtcttttcagtggcgccggggattctgattttgatgacctgctttacgagaatcgtcatcgtcctgtcttttgtaagaacctcactggcgacgcagaacatgcctcccaaccaggttttaatcggccttgcgctgttcttgacgttttttattatggcgccgactttttcagagattaataaggaagccttaacgccgctgatggacaacaaaatcagtctcgatgaagcatatacaaaagccgagaagccgattaaagagtatatgagcaagcatacaaggcagaaggatctggcgctgtttatgaactatgccaaaatgaaaaaacctgaatcgattcaggatattcctttgacgacgatggtgcccgcttatgcgatatcagaactcaaaaccgcttttcaaatgggctttatgatttttattccgtttttaattatcgatatggtcgtggcgagcgtcttaatgtcaatgggaatgatgatgctaccgccggttatgatctctctgccctttaaaatattgcttttcgttttggtcgatggatggtatttaatcgtgaaatctttgcttgacagcttttagggtaggtgctaattgtgagttcagaatttgtaatttccatggcggaaaaagccgtatatgtaacactaatgatcagcgggccgctgcttgcgatcgcgctgattgtcggtttgctcgtcagtatctttcaagcgacaactcaaatccaggaacagacgcttgcgttcattccgaaaatcgtggcggtgatgcttggactgatctttttcggtccttggatgctgtcgacgattctttcgttcacaactgatctgttttctcatctgaaccgatttgcagggtagaatcaaatgaattccatcattgatttatttcccgcttttttattggtctttatcagaatctctgctttttttgtaacggtgccggtgttcggacatcggaatctgccggcggttcaccgaatcggctttgctttttttctttcggtgatctgcttcagcacgctgaaacatgcgccggaaatagaaataggggaacagtatatgctgcttgtcataaaagaggccgttgtgggcttgagcctcgggctgatcgctttcatgatgatgacagccattcagatagcaggttcctttattgattttcagatgggcttttccatcgccaatgtcattgatccgcaatcaggaacgcaaagcccgctgatcggacaattcgtttatacgctggcgctgttatttatgctcagcgtaaacgcccattatcttttattggacgggatttattacagctttcagtatatcccgcttgatcaggcatttccgtcgtttggaaatgatcactttggactttttatcgcaaaaagcttcaatgccatgtttattatcgcttttcaaatgtctgcgccggttgtggccagtctgtttttagttgatttggcgctcggtatcgtggcgagaacggtgccgcagctgaatgttttcgttgtcgggcttcctctgaaaatagccgtgagctttattatgctgatcgtttgtatggcggtgatgtttgtcgttgtccgcaacatcttcagccttaccgttgaaaccatgcgaaatctattggcattggtcggtgtgacatgatgaggctcagactgaatctgcaattctttgccggtgaaaaaacggagaaagccacgccgaaaaaacggaaggatacaagaaagaaaggacaggtcgcgaaaagtacggatgtgaatacagccgtttctttactgattatctttctttcgctgatcgcgctcggtccttatatgcgggacaggctgctgtcctttattaaaacgttttatacgaaatcgatatctttacatctgtcagcatctgccgtgcatgaactgttcgtggatacggtgaaagatatcagcctcattctcgcgccgattatgctggtcgcgcttgtggcaggtgtcgtgagcaattacatgcaggtgggttttctgttttctgcggaagtcctcaagcctgacttgaataagctcagcccgctgaaaggatttaagcggatttacagcatgagggcgattgttgaactggtcaaatccattttgaagattactgtggtcggttttgccgcctttatggtgctctggctgcattatggcgatattcttcgccttccgcttttgactcctgcggaagtgctcactttcgtttccaagctcactctttggatggggcttgcgggatcaggggctttaatggtgctggccgggcttgattacttatatcagcgttttgattatgagaaaaatatcagaatgtcaaagcaggatataaaagatgaatacaaaaaatcggagggtgatccgataatcaagtccaaaattaagcagaagcagcgggaaatggcgatgaggcggatgatgcaggaagtgccgaaagcggatgtcatcattaccaacccgacccattatgcgatagctttaaaatatgatgaaaagaaaatggacgccccttacattgttgccaaaggggtggaccatctcgcattaaaaatcaggcagatcgccaaagaacacgatgtcatgacgattgaaaacaggccgctcgcgcgtgcgttatatgatcaggttgacattgaccaggccgtgccggaagagtttttcaaagtcattgcggaaattttggcttatgtatataaaacgaaacaaaaagtatagtgaatttcagattcaaaaggagagaaaaacagcatgtcaacaagagatttatcggttttaataagtgttgtcctcattgtggcaatgctggtgattccattccctccatggttgttaagtattttgatcatcattaatatctctcttgcgttgatcgtgcttctcaccacaatgaatatgcaagaaccgctgcaattctcgatattcccgtcattgctgctgttattgacgctgtttcggctttcgctcaatgtgtcgacgacacgttcgattctttctcacggagaagggggaaaggttgttgagacattcgggaatttcgttgtcggcggaaatgtgctggtagggcttgttgtcttcattatcttgattattattcagtttatcgtcattacaaaaggcgccgagcgggtatcggaagtggcggcgagatttacgctcgatgcgatgcccggaaagcaaatgagtattgacgcggatttaaatgccggcatgattacggagcaggatgcaaagcacagacgtgaaaaagtcgcccgggaagcggatttttacggcgccatggacggtgcgagcaaattcgtcaaaggggatgccatcgcgggtatcatcatcgtgatgatcaatattattttcggaatcgtaatcggcatgctgcagcaggggatgagcatacaagaagctgcgtctcactttacaatgctgacggtcggtgacggtatcgtttctcaaatgccggccttgctcatttcaacggctacagggattgtcgtgacgagagcggcatctgaaggaaacctcggtcatgatattacaggccagctgtttgcttatccgaagctcttgtatgtagccgcgggaactgtacttttgctcggtcttcttacaccgatcggcattctgctgacggggccgatcgccggtctgcttgcattcggcgcttacatgctgtccaaagcggataagccgagcgaagaagaggaagaaattcttgaagaagaggctcaggcggatgaactgaaaagcccggaaagcgttgtgcagcttttacatattgatccgattgaatttgagttcggatacggactcgtgccgcttgcagacgcggggcagggcggtgatcttcttgaccgcatcgtcatgatcagacgtcagcttgcgcttgaattgggacttgttattccggttgtgcgcatcagggataacatcgcgctccagccgaatgaatacagattgaaaattaaaggcaatgaagtcgctaaaggagagctcctgctggatcattacttagcgatgtcaccgacgcctgaagatgacgtcattgaaggaattgaaacgatagagccgtcgttcggacttcccgcaaaatggatcagcgaagctgcaaaagatgaagcggacatgctggggtatacagttgttgatccggcgtcagtcgtatctacgcatattacagaaaaaattaagcagcatgcccatgaactggtcggcagacaggaaaccaagcagctgatcgatcatctgaaggaaaattatcctgtgcttgttgaggaagtcacgccaaaccctctttctgtcggcgatattcaaaaggtgcttgccaaattgctgagagaaaaagtttcaatcagaaacttggtgaccatttttgaaactcttgccgattacggaagattaacgacagattcagatcttttgacagaatacgcgagacagtcgcttgccaaacaaatcacggcacaatatgcgagagagcatgaaacgctgaaggtcatcacatgctcaggccgggtggaaaaagcgattgcagacggggtacagcagactgaacagggcaattacctgtcactcgaccctgaggtttcagacagcatcatccgttctgtcgctaaagaggccgagcagctttccatccgccaggagtcggcgattcttctttgctcgcctgctgtcagaatgtatgtaaaacagctgttagaacggtatttccctgatcttccggttctttcttataatgagctggaagcaaatgttgaagtgcagagcattggagtggtggatatttaatgaaaataaaaaaatttacagccgcttcaatgcaggatgccgcgaagcaaatcaaaaaggaactcggcaatgatgccgttattttacattccaaacaagtaaagaaacgaaaatggctggggctgcggtcgcagcaggccgtcgaagtgatagcggttttagatcgtgacgtcagggaagcgagaaaaacgccgccggctgccgctgaagaaatgaaaaagacgaaaacggcggagaaagctgagcctgttcagccgccgcgccttccggatcaaagtatttccggcgaactggcgcattttaaagaagtgctccctgaaccattaaaaaaagccgagagactattgaagcaagccgggcttcctgatcatacgcaaaacgccgtactcagtgaactgctccgttcttcaattgtttccggagatttaactgaagaaaatgtcagctcaaaactgcaggatttgttagtgaaaaaactcccttcggcagacaggtggcaggaagggattcaatcaaaatacgtcgtgcttttcggttcaaccggggccggcaaaacgactacacttgcgaaactcgcggcctcatcaatgctgacagagcataaaaaaattgcctttatgacgacggatacttaccggattgccgcagtcgagcagctgaagacatatgcggagctgcttcaggctcctcttgaagtatgctattcaaaggaagaatgtctgaaggcactggaaaaattcgctgaatatgaccatgttttcattgatacagccggtagaaactttaaagaagagcagtatattacggaattacaagagatgattccgtttgaatcaggcttacaatcctttctcgtattatccgcatctgcaaaatatgaagatatgaaacaggtgctgaaacagttttcaggtgtgccggtcaatcaattcattttcacgaaaacggatgaaaccgcctcactcggctccgtgtttcaagtgctgtcggaatcaagaatcggcgccgcctatttgacaaatggacaggatgtgcctgaagacatcctatcggcttcaccaaaagagtttgtaaggatgcttttgacatgaaacccgatcaggcagagtcattaagaaggaaaatgagagagcggcaaatgatcaagacggagctttatgagaaaaaagcgaagacattagccgtcatcagcggtaaaggcggcgtcggaaaatctaatttaacattaaacatggcagttgccctgcaggaaaaaggaaaaaaagcactcatcattgatcttgacatcggaatgggcaacattgatgtgctgatcggcgctgcttcttcccgcaccattattgatgtgatggagaatcggcacgcgttggcgcaatcactgtcctccggtccgaaaggccttcgctacatatccggaggaacggggcttgaggcgatctatcaagcagacagagagaagtggtcggcttttatgaatggtctttccgctgtattaagcgattttgattacgttctgtttgatatgggagcgggactttcaaaagaacagctgccgtttattttatcggcggaagacattctcgccgtgacaacgcctgagccgacggccattatggatgcttacagcgcgatcaaacatcttttgctcgcggatgaacggctgactgtaaacattgccgtcaatcgcgcccgcgcccaaaaacaggcgctggacacgtacaaccgcctttctcatgcgattcacacgtttttaggcgcggaggtgcgtttcgccggctccatacccgatgacccgctagtaagtcaagccgtcattgaccaggtgccttttttaataaaaagtcctcaagcaaaagccagcaggtccgtccgtcttctgacggatgtcttgtttcaaacggaagaaaacaaaccaagagaagagaaaccggcatttattgagagattatcttcttttttattgaggaggactttacagtgattcgtgtgcttgtcgttgatgactcagcttttatgagaaagatgattaccgattttctggctgcggaagtgcagatagaagtcatcgggacagccagaaacggggaagaggcgctgaagaaaatagagcttctcaagcctgatgttgtcacgcttgatattgaaatgccggtcatgaacggaacggatacattgcggaagatcatcagcatatataaacttcccgtaatcatggtatcgagccagacacagcaagggaaggaccgaacgatcaactgcctggaaatgggcgcttttgattttatcaccaagccttccggagcgatttcacttgatctttataaaattaaagagcagctgattgagagggtgattgcagccgggctgtcccgcgcacaaaaacctgaggcggcagtgaaagagtcttctatcccggaacgtccggctttggcgggatttgaaagaccgaaagcaaaatccgccaagcaggccgtattcatcgcgacctctacaggcggaccgcgggctctgcaaaaggtgattccgaaactgccgaaggatttaaaggcgcctgtatttgtcgttcagcacatgcctgaaggcttcaccgcttcacttgcagacagactcaaccatttgtcagatattcaggtcaaagaagcggaaaacggtgaagaagcgaaagacggatgggtgtacatcgcacccggcggaaaaaatatgacggttgcagaggaaggcggaaggctccgcatcattcttgacgttcatgatacggaaagccggcataaaccgtcagccgattatttgtttcggtcggcaagccgcttatccgattacgaaaaggtagccgtcattatgaccggcatgggcagcgacggaaccgagggtgtaaaagaaatgctcagaacaggcggcgttaaaacgattgcggaatcggacgaatcctgtgttgtgttcggaatgccgaagtcagcgataaaggcgggcctcattcatgagattaaacatgtggaagatatcgcggcatccatcaccggatgtgtgaaaaaagagagggtgtgaatcaattggatatgaatcaatatttagatgtctttattgatgaaagtaaagagcacttacagacatgtaacgaaaagctgctgctgttggaaaaagatccggcagaccttcagcttgtgcatgacatcttcagagctgcccatacgctgaaaggcatgagcgcaacgatgggatatacagatctggcgcatttaacccacctgatggaaaatgtgctggacgctatccgcaacggagaaatgcccgttacatcagattggctggatgtgctgtttgaagcgcttgatcatctagaagagatggtgcagtccattattgacggaggagacggcaaacgtgatatttctgaagtgagtgcgaagctcgacgtaaatgcggtgcatgagactgcggcttcagccgaaacagcagaaccgccggcttcaaaacaacaggcttcaactgaatggaattatgacgagttcgaacggactgttattgaagaggcggaagagcaaggattcagccgctatgaaataacggtttccctgaatgaaagctgcatgctcaaagccgtgcgcgtgtacatgatatttgaaaagctgaatgaagccggggaagtcgcaaaaacaatacccgccgcggaagtgcttgagacggaagatttcggaacggattttcaggtgtgtttcttgacaaagcagcctgctgaagaaattaaagaactcatcagcggcatttcagaagtggagaatgtcgaaatttctgccggtgcgccgttaaaaacggccgaaaaaccgcaagcggctgaaccggtgaaggaagctccggttaaaaaggctgagaaacagcctaagccgcaagcgaaaacggaagaacagccgaagcatcacagcggctcgaaaacgattcgcgtcaacattgaaagactggattcttcaatgaacctttttgaagaacttgtcattgaccgcggacgtcttgagcagatcgccaaagagcttgaccacaatgagctgactgaaaccgttgaacgcctgaccagaatctcgggcgaccttcagtctattattcttaatatgcggatggtgccggtagaaaccgtctttaaccgtttcccgagaatgatccgccagcttcaaaaggaattaaacaagaaaatcgaattgtccatcatcggagctgaaacggagctggaccgcacggtgattgatgaaatcggcgatccgcttgtccatttaatcagaaacagcatcgatcacggcattgaatcgcctgaagtgcgggtgaataaaggaaaaccggaatcaggtcatgtcgtgcttaaggcatatcacagcggcaaccacgtctttattgaggttgaagatgacggggccggcctgaacagaaaaaaaattcttgaaaaagcgctcgagcggagtgtaatcaccgaacgtgatgctgaaacgcttgaagataatgagatttacgagcttatttttgctccgggcttctcgactgccgatcaaatttctgacatttcagggcggggcgtcggcctggatgtcgtaaaaaataaactcgaatcactcggcggctctgtcagtgtcaaatccgcggaaggccaaggttctcttttcagtatccagcttccgctgacactttcaattatatccgttcttctcattaaactggaagaagagacgtttgcgataccgatttcttctattatagagacggctgttattgataagaaagatatcctgcagacgcatgacagagaagtgattgatttcagaggccaaatcgttccgatcgtctatctgaaaaaagaattcggcattacggattcaaaacaggatgccgatcagttccatgtaatcgtcgtgaaaaagggcgataaatccactgcttttgtcgtggactcttttataggacagcaggaagtcgtactgaaatcactcggcgactatttgacgaacgtctttgcgatttccggcgctacgattcttggaaacggagaagtggcgctgattattgattgcaatgcgctgatctactaaaacgacacgaggaggtgcccgaatgactgctgaaatcaaaacaggtgaaaaaatgattgtgtttatgataaacgggaaagaatacgctatctcagtttcccaggtgaaatcaattgaaaagtggcaaaaaccgacgagggtcccgggtgtggaatcttatatccgcggcgttatcaatctgcgcggagtgattaccccggttcttgatttaagaaaacgtctgaatcagcctgaacaggacatcacagaagagactcggattatcatcatttcttaccgtgacgctgatgtcggatgggtcgtggatgaggccaatgacgtcatcaccgtgcatgaaaatgaaatcgaatccgcgcctgaaagccagacaaaggaaacggatgtgtggattaaacagatcgtcaagcaagataacaggctcctcaatattatcgatgcgcatgcggtgctggataaaggtgcttcggcatctgcgtccggagagcctaatgcttaaaggggaaaagacaacatgagtaagtttgaagcgatcaaagaagagcagatggatattttgcgggaagtcggaaatatcggggcgggtcactcggcttctgcaatggctcagctgctgaacagaaagatagacatggaagtgccgtttgcgactttattgacatttgatgagctcgctgattttttcggcggggctgaaacgccggtcgccagtatctttttaagaatggaaggcgacatgaccggctctatctttctcatcatgccttttcatcaggcggaacagtttatcagagagctgatcggaaatccggattttgatattgaccagttgggcgaagatcatttgagttcttctgctttacatgagttcggcaatattttagcaggttcctatttaacggcattggctgatttgacaaagcttgagatttacccgagcgtgccggaaatctcacttgatatgttcggcgcggttatcagtgaagggctgatggaactcagccaagtcggagagcatgccattgtcgtggatacttctatttttgaccagggcagccggcaggagctcaaagcccacatgtttatgctcccggactatgattcttttgaaaagctcttcgtctcattgggtgcggctttatgagccgtgcggaagccgcagtcgttaaagtggggattgcggatgttcaagtcgcgcgttacccggataaaatccggacctcgggactcggttcatgcgtagggctggttttatacgataaagacaaacaaacggcaggactcgttcacgtcatgctgccggactccggtttatcaaaaacggcagagctcaaccgtgcaaaatacgcggacaccgccgttaagatgacgattgatatgcttttgaaagccggctgccgcaagtttgccctgaaggcaaaactcgccgggggagcggagatgtttaagtttaaaatgacaaacgacctgatgaaaatcggtccgaggaatgtagcggccatcaaagagcagctttcattgtataacattccggtcatcagtgaagatacgggcggctcaagcggccggacgattgaatttgagccaaagtcctgcatgctgcacattcgaactgttaaacaaggtgaaacaacgatttaataaaggtatgaggtagggggataacaatgcaatccttgaattatgaagatcaggtgctttggtcgcgctggaaagagtggaaagatcctaaagccggtgatgatttaatgcgccgttacatgccgctggtcacatatcatgtcggcagaatttccgtcggactgccgaaatcggtgcataaagacgatctaatgagccttggtatgcttggtttatatgatgccctggaaaaatttgaccccggccgggatttaaaatttgatacctatgcctcgtttagaattcgcggtgcaatcatcgacgggctgcgtaaagaagattggctgcccagaacttcacgggagaagacaaaaaaagtcgaagcggcgatcgaaaaacttgaacagcgctaccttcggaatgtgacgccttcagagatcgcagaagagctggggatgacggagcaggacgtagtatcaacgatgaatgaagggttttttgccaatctcttatcaattgatgaaaagcttcacgaccaggatgacggtgagaatattcaagtgatgatcagagatgacaaaaatgtgccgccggaagaaaaaatcatgaaggacgagctgatcgctcagcttgcgggcaaaattcacgagctctctgaaaaagagcagcttgtcgtcagtttattctataaagaagaactgactttgaccgagatcggacaagtcctgaacctttcgacgtcgcggatttcacagattcattcaaaggcgctgtttaaattaaagcatctgcttgaaaaagtaattcaataatgaactcatggttagcgagtgaaaaacatgtcaacactattatggcttttaagctttgtgcttcacggcgtactgctttatgccgtcattattctgtacacgaggttttcagccctcaaggagacggagcgccagcagaagaagattcttgaagagacggaaaacacccttgcagcgtttctgcttgagctgaaagaagaaaatgaaagactcgaagacgcaaaaagccggaatgatcaagcgcctgacgcagaagacgccgaaccccggccggaaccgaaaaaagagcctgatattcctgaccacatggaaaagctcatcagtgcaacggaacgggctgaaagtgatgaaaacaacggcgcgcattcgtttgaagaacgtgtttcagaattatatgaacaagggctcacccccgcggaaatcgccaaacggatgcagagcggaaagacagaaatcgagctgtttttaaaatttcgcggcaaagctgtaaaggattcttgattgtcgcataaagctgtgttatattatgtcttggtgttaaatacacacgcttaacgatttatgcagagggtgctgcaaacggcagttctgcacaaaaatgacctgagcggaggaaaaaaaccattttattaggaggaaatcacatgtcagttatttctatgaaacaattgcttgaagctggtgttcacttcggccaccaaacacgccgctggaacccaaaaatgaagcgttacattttcacggagcgtaacggaatctacatcattgaccttcaaaaaacagtgaaaaaagtagaggaagcttacaacttcacgaaaaaccttgctgctgaaggcggaaaaatccttttcgtcggcacaaaaaaacaagctcaggattctgttaaagaagaagctgtacgctctggcatgtactatgtcaaccaacgctggttgggcggtacactgacaaacttcgaaacaatccaaaaacgcattaagcgtctgaaagacatcgagaaaatgcaagaaaacggtacatttgaagtacttccgaaaaaagaagttgttcaattgaaaaaagaattagagcgtcttgaaaaattcctcggcggaattaaagacatgaaggatcttcctgatgcattattcatcatcgatcctcgcaaagagcgcatcgctgttgcggaagctcgcaaattgaacattcctatcatcggaatcgtagatacaaactgtgatcctgatgaaattgatgtcgtaatccctgcaaacgatgacgcaatccgcgctgtcaaacttcttacttctaaaatggcagatgctattcttgaagcgaagcaaggcgaagaagaagcggaagctgctgaagagactgcacctgaaacagaaacgacaactgcgtaacctaatcaaaaggtgataagagggactgccttttatcaccttttttcaagaaaaatgtatctatacatatcttgtttacacatataggaggaattcaaatggctattactgcacagcaggtaaaagaactgcgtcaaaaaacaggcgctggtatgatggactgtaaaaaagcattgactgaaactgacggagatatggacaaagcaatcgaccttctgagagaaaaaggaattgcgaaagcagctaaaaaagctgaccgtatcgctgctgaaggttctactcttattaaaactgacggcaacaaaggcgttatcttagaagtaaactctgaaactgatttcgttgcgaaaaacgaaggcttcaaagagcttctgaacacgcttgctgaccaccttcttgcaaacgctcctgctgatcttgaagaagcaatgggtcaaaagatggaaaacggttctactgttgaagaatacatcacaagcaacgttgctaaaatcggagagaaaatcactcttcgccgttttgctgttattacaaaagaagacagcgaagcgttcggtgcttaccttcacatgggaggccgcatcggcgtattatccgttcttagcggaacaactgacgaagatcttgcaaaagacatcgcgatgcatgttgcagcggtaaatcctcgttacatttcccgcgaccaagtgtctgaagaagaagcaaaccatgagcgtcagattctgactcagcaagctcttcaagaaggcaaaccggaaaacatcgtagctaaaatggttgaaggccgtctgaacaaattcttcgaagaaatttgcttattagaccaagctttcgttaaaaacccagacgaaaaagtgaaacaagttgtggctgcgaaaaacgcatctgttaaaacttacgtccgctacgaagttggagaaggtattgaaaaacgccaagaaaactttgctgaagaagttatgaaccaagtgaaaaaataatggcggaaagccttggcgaatctttcgcggcttttcaggcagtataggggacactacttgtgttccctatttttaaaactatatttacaaacctttttttctcttgcataataggaaacggcaatgtttacacttggaggttattatggaaaaaccaaaatacaatcgtatcgttttaaagcttagcggagaagcattggcaggagagcagggaaacggcattaatccgactgtcatccaatccatcgctaaacaggtaaaagaaatcgctgagcttgacgtcgaagtggccgtagtcgtaggcggcggcaacttatggcgcggaaaaacaggcagtgacttaggaatggaccgtgcgacggccgattatatgggcatgcttgctactgtcatgaactcacttgccctgcaggacagcctggaaacgctcggaattcagtccagagtgcagacatcaattgaaatgcgtcaggtcgctgagccttacatcagaagaaaagccatccgccacctggagaaaaaacgcgttgttatttttgccgcgggaacaggaaacccttatttctctacggacacaaccgcagcgctgcgtgccgctgaaatcgaagcggacgtgatcttaatggcgaaaaataatgtcgacggtgtgtataatgctgatccgagaaaagatgagtcagctgttaaatacgaaaaattatcttatctcgatgtgttaaaagacgggctggaagtcatggattctacggcttcttcactatgtatggataatgatattccgctgatcgtcttttctattatggaagaaggaaatattaagcgtgccgtaatcggcgaatcaatcggaacgatcgtaagggggaaataacgttgtcaaacgaagtattaacacaaacaaaagaacgcatggaaaaagcggttgccgcttattcacgtgaattggcgtcagtccgcgcaggacgtgccaacccatctctattggataaagtgacagtagaatactacggtgcccaaacacctttaaaccagctgtcttccatcaatgtgcctgaagcgcgtatgcttgttgtcacaccgtatgacaaaacggcaatcggcgatattgaaaaagcgattctgaaagctgatcttggcgtaacgccgacaagtgacggcacaattatccgcatcgcgatcccggctctgactgaagaaagacgtaaagaacttgtcaaagtcgtgaaaaaatacgcggaagaagcgaaagtagcagtccgtaatgtccgccgtgacagcaacgatgacctcaaaaaacttgagaaaaacggagacattacagaagacgagcttcgtgcttccagtgaagacgttcaaaagctgacagatgaatatgtgtcaaaaattgacagcgtcacaaaggacaaagaaaaagaaatcatggaagtttaatgaaaaactatgtacaatagataatgtgaaaagaccctctcatgtttacagggggtttttttgttaatactgttgattacattgatcatcagcaacgcaacctttttgggtgacggaggaatctcatgctcaacatactcaaaaattggaagaatcagcagaatgcggcttccaacttagaacggtatacaaaagaagacatactgaagggtgaaattcccgcacacattgccattattatggacggaaacggacgctgggcgaagaagcgctcactccctcggattgcaggacatcatgaaggaatgaaagtggtaaaaagggtgacaaagctcgcaagtcagctcggcgttaaagttctgactctttatgcgttttcaacggagaactggaagcgcccgaagatggaagtcgactttttgatgaagcttccggaagagttcctgaatacgtatcttcctgaattaatagaggaaaatgtacaggtgaaaattatcggagatgaatccgcgctcccttctcatacgtacagggcgattgagaaggccgtaaaagatacagaacaaaatgacgggctgattctcaatttcgctttgaactacggcggacgcacggaaatcgtcaatgcggcaaaagcactggctgaacaggtgaaaagcggcacgctgaatatcgaagacattgatgaagcgctcttttccgggcatttaatgacagaatcactccaggacccggagctgctcatcagaacgagcggagaaatcagattgagcaactttatgctttggcaggtggcttacagtgaatttgtttttacagatgtcctgtggcccgattttaaagaagatcactttctgcaggcagtgggagaatttcagcagcggggccggaggtttggcggaatttagaggatggtggaaatgaaacaaagattgttaacaggtgttctggcagcggcattatttttatttttggttattttcggaggattgccgttcaccgtatttgtttacgtgatgggaagtatagcgctttttgagcttttgcggatgaaaaagctcagatttttttcttttccgggtctgatcagcctcttgttgttatggctgtatatgatgccggacaagtatcattttttcgatgcgaaaatggaagtaacgattttcgccgtattgattctgctcagctatacggtgctcgtgaaaaacacctttacgtttgacgaagtcgggtttatcgttctcgcgacggtatatatcggactgtgttttcattattttattgaaatcagaaacattgaaacaaacgggcttttgtatatcttttatgcctgcgttgtcatatggtcaacggactcaggcgcatatttcgtcggaaagtcgctcgggaagcggaagctgtggcccgaaatcagtcccaacaaaacggtggaagggtttctcggcggtattgtcatcgcccttatttttacggctgtttttcagctgtttgcgcaccttccgatttcatacccggttcttttggtcatcacgcttgttttgtctgtgttcggacagatcggggatttggttgaatcagcgcttaagcggcactatgatgtgaaggattcgggaaaaatccttcccgggcacggcggcattttagatcgatttgacagctttttgtttgtcatgccgttcttatactttctgcttgcgcttttttcatgagaaaggctaatatgaaaataagaccgatctggacgcatagaatgggagtggcattttgaagaatatttgtcttttaggagcaacaggatcaataggggagcagacgttagacgtattgcgcatgcatcaagatcagttccgtctcgtctcgatgactttcggtaaaaacgccgagaaagcgatcccgttgatcagaacgtttcagccgaaatatgtagcagtcggcgacatggatacatatcaaaaagtgaaagaagcgtctttttctcatgaatgtcaaatcggcatcggagaagaaggcctgattgaagcggcagtcatggacgaagtcgatatcgtggtcaatgcgctgcttggaagcgtcggtttaatcccgactttgaaagcgattgaacagaaaaaaacaattgcgcttgcaaataaggaaactctcgtcactgccgggcatatagtgaaaggacacgcaaaacgatacggtgttcctcttcttccggtcgacagcgaacattccgctattttccaggcgctgcaaggcgaacagagcaaaaatatcgagcgcctggtcattacggcatccggcggcagtttcagagataaaacgcggcaggagcttgagtctgtaacgattgccgacgcccttaaccacccgaactggtcgatgggcgcaaaaattacgattgactcggctacaatgatgaataaaggacttgaagtcattgaggcgcattggctgtttgacattccgtatgaacagattgacgttgtattacataaggagagcatcattcattcgatggttgaatttcacgacagaagcgtcatcgcccagctcggaaatccggacatgagggtgccgattcaatatgcgctgacatatccggaccggctgcctctgcctgaaacaaaaaggcttgaattatgggagatcggaagcctccattttgcgaaagctgactttgaaaggttccgctgcttacaatttgcctttgaatcaggtaaaatagggggaacgatgccgacggttttaaatgcggccaacgaagaagccgttgctgcttttcttgccggacggatttcattcttatcgattgaggacctgattgaaaaagcattggaccgccacagcgtaattcaggatccgagtcttgcggatatccaagaagtggacaaagacacccggggatacgttaattcaatactcacataaggtggtatgttcgtgaatacagttatcgcgtttattattattttcggaacgctcgtttttttccatgagctggggcatttattgctcgcccaaagagcgggaatcctttgccgtgaatttgcgatcggcttcggccctaaaatcttttcatttaaaaagaatgaaaccgtgtatacgatcagactccttccggtcggcgggttcgtccgcatggccggtgaagacccggagatgatcgaagtcaaacccggttataccgtcgggcttctttttaataaagatgacgaagtggaaaaagtcatcattaatcaaaaggaaaaatatcccgacgctttaattatcgaggtggagacggctgatcttgagcacgaaatgaagattaccgggtacgagcaggggaaagaagatgaactggcgggctttactgtcagtcagacctccttttttatcgtagacggagaagaagtgcagattgcgccttacaatcgacaattcgggtctaaacccgtatggaagcggattaaggcgattgctgccggtccgataatgaacttcatcttagcgtatgtcattctcgtcatgcttggattcattcaaggcgtgccttcgaatcagcctgagctcgggaagctgacagacaatggacgcgcagcggctgccggtttaaaagaaggcgactatatccagagcattaacggggaaaaaatgaggtcatggacagacatcgtgacagcggtaaaagaaaatcccggaaaaaaaatcgatgtcgccgtcaaacgggacggcaaatcgtttcatatctcggttacacctgaagctgtaaaagatgaaaataaaaaaacaatcggccgcttcggctcttatgcgccgactgaaaaaggcgcgcttgcagcgattgcctatggcgcgacatctaccgttgatgtcacaaaagcgatcctgaccaatctgagcaaacttgtgacaggccagtttaagcttgatatgctttcgggtcctgtcggcatttatgatatgacggatcaagttgcaaaaaccggtattatcaacctattccagtttgcggcgtttttaagcatcaacctgggaattgtcaacctgctgccgatcccggcgcttgacggcgggcggctgctgtttttattcattgaagcaatccgcggcaagccgataaaccgtgacaaggaagcatttgtcgtatttatcggcgtagctttcttaatgcttcttatgctggttgtcacatggaacgatatccagcgtttattcttataattgactagtaaaaaatcagaggtgcgaagacatgagacaaagtttgacgcttattccgaccctgagagaagtgccggctgatgctgaagcaaaaagccataagcttctgctgagagcgggatttatcagacaaaatacgagcggggtttacagttacatgccactggcttacagggtcattcaaaacattcagaagatcgtgcgtgaagaaatggaaaaaatcaacgcggtggaaatgctgatgccggcccttcagcaggctgaaacatggcaggaatcaggcaggtggtatacgtacgggcctgaattaatgcgtctgaaagaccgccacggccgtgaatttgctttaggcgcgacacatgaagaagtcattacttctctcgtgcgcgatgaggtgaaatcttataagcgtctgccgctcactctttaccagatccagtctaaattcagagatgaaaaacgcccgcgtttcgggttattgcgcggacgcgaattcatcatgaaagatgcgtattctttccatgcttctgaagaaagtctggaggaaacataccaaaacatgtacggcgcatacagcagcattttcgcacgctgtgaattaaacgtccgtcccgttattgccgactcgggcgcgatgggcggaaaagacacgcatgaatttatggctctttctgaaataggggaagataccatcgcttattccgatggatcctcttacgcagccaatacggaaatggcggaagttgtcatgaacagcgagccgccagatgaaacacccgaggcattggagaaaattgatacgccgaatgtcaaaagcattgaagagctcgcttcgttcttgcagatcgagccgagcgcctgcatcaaatccatgctgtttaaagctgatgaccgatttgttctcgtgttagtaagaggcgatcatgaggtcaatgacgtgaaagtgaaaaaccttctgaacgcggaagtggttgagcttgcgtctcatgaagaagtagcagagaaacttggcacggagccgggatttgcggggccgatcggcgctgccggcgacattgagatttatgccgaccaagccgtgaaagtaatggtaaacgccgttagcggcgcgaatgaaaaagaccgtcattaccgaaacgtaaacatcgagcgtgacgcgtctgtaaaagcgtatgccgatcttcgaatcattcaggaaggcgatccgtcacctgacggaaaaggcacgatccgtttcgctgaagggattgaggtcggacaagtctttaaactcggcacgcgttactctgaagcgatgaatgcgacataccttgatgaaaacgggcgtgcgcagccgatgctgatgggatgttacggaatcggcgtgtccagaacgctttcagccatcgctgaacagcatcacgacgaaaaaggcttgatctggccgaaaagcgttgctccgtatgatcttcatattttggcgctgaatatgaaaaacgaagcgcaaaaagagcttgctgaacagctttacggcaaattccaggcggaaggttatgaggtattatacgatgaccgcgctgaacgcgcaggcgtgaaatttgctgattctgatctgatcggccttccgatccgcatcactgtcggaaaacgtgccgacgaaggcatcgtagaagtgaaaatccgcaaaaccggtgaatctgccgaagtttcagtgggtgagctttctgaatttatcaagacgaagtaatcaccataacgaatcatacaaaatcatgttaaaatagagaaaaaagaaggtacctcatcacctgcggaggtaccttcacttatgatgttttaagggagggatactgtctgaatggaacagttatcagtaaacagaagacagtttcagattcttctgcagcagcttaatatgacagatgataccttcatgacatactttgaagacggagagattgataaactgacaatccataaagcagaaaaagcctggcatttccaatttcgctttaaggctcttttgccgtatcaaatatatgattcattcatgatgaggttaacacaatcgtttgctcacatcgcccgtgtcacatcgtctgttcaggtcattgatcctacagtgacagaggagcttgtacaggattattggacacgctgtattgaagagcttgaaggaacctcgccgccgatggtggctcttttgaatcagcagaagccgaagctcaaaggaaacaaactgatcgtgaaaacaaaaacagatacagaagcatctgcgcttaaaaacaaatacttcgcgctgattcagcacagctatcgccaattcggctttccggaactgcagctggataccgaaattttcatatctgaccaagaagtccagaaattccgcgagcaaaagcttgctgaagatcaggagcgggcgatgcaggcgcttatcgagatggagaagaaggaaaaagagggcgatgaggatcaggcaccgtccggaccgcttgtcatcggctatcaaattaaagagaacgaagaaatccggacgcttgacagcatcatggatgaagaaagaagaattacggtgcaggggtttgtgtttgatgctgaaacacgcgagctgaaaagcggacgcacgctctgcattttcaaaatcacggactatacaaacagcattttagtaaaaatgttcgccagagaaaaagaagacgccgctttgatgaaaacgctgaaaaaaggcatgtgggtgaaggcgcggggaagcattcaaaacgatacattcgtcagagacctcgtcatgattgcaaatgacgtgaatgaaataaaagccaaaacccgtgaagacaccgctcctgaaggcgaaaaacgggttgagcttcatctgcattctccgatgagccaaatggatgctgtaacgggcatcggaaagcttgtcgaacaggcgaaaaaatggggacatgaagcgattgcgttaactgatcatgccgttgtgcagtctttcccggatgcctattccgccgcgaaaaaacacggcattaaaatgatttacggaatggaagccaatatcgtagatgacggcgttccgatcgcatacaatccagctcaccgtctcctggaagaagacacatacgttgtctttgacgttgaaacgacaggtctgtccgcagtgtatgacaccatcattgagcttgccgcagtcaaaataagaggcggagaaatcatcgataaattcgaagcgttcgccaatccgcaccatccgctgtcagcaacgacgatagagcttaccgggattactgacgacatggtccgcgacgctcccgatgtcgttgatgtcgtccgggattttaaagaatggatcggcgatgacgtgcttgtggctcataacgccagctttgatatgggatttttaaatgtagcgtacaagcgtcttttgaaaacggaaaaagcgaaaaatccggtcattgatacgctggaactcgcgcgtttcctgtatcctgagtttaaaaatcaccgcttaaatacgttatgtaagaagtttgatatcgaattaacccagcatcaccgagcggtttttgacgctgaagcaacgggctacctgctgttgaaaatgctcaaagatgccgctgaaaaagacattttttatcatgatcagctgaatgagaatatgggacaatccaatgcttatcagagatcaaggccttatcacgctacattgcttgccgtaaatgagaccggccttaaaaatctgtttaagctcgtgtccatttctcatattcaatatttctacagagtgccgcgcattccaaggtcgcagcttaataaatacagagaaggtctgttaatcggctctgcctgtgacaggggtgaggtctttgaaggcatgatgcaaaaatctcctgaagaggttgaagatatcgcatccttctatgattatcttgaagtgcagccgccggaagtatacagacaccttctgcagcttgagctcgtccgggatgaaaaagcgctgaaagaaatcatcgccaacattacgaagctcggagaaaaattgaataagccggtcgtggctacgggaaatgtccactatttaaacgatgaggataaaatttaccggaagatcttaatatcttcccaaggcggcgccaacccgttaaacagacacgaactgcctaaagtgcacttcagaacgacagatgaaatgctggaggctttctccttcctcggtgcggaaaaagcgaaagaaatcgtggttgacaatacgcagaaagtcgcttcgatgatcaatgagatcaaaccgatcaaagacgatctgtacacgccgaaaattgacggggctgatgaagaaatccgtgaaatgagctatcagcgcgccagaagcatttacggtgaagagcttcccgaaattgtggaagcgagaatagaaaaagaattaaaaagtatcatcggccatgggttcgccgttatttatctcatctctcataagcttgtaaaacggtctctggatgacggttatctcgtcggctcccgggggtccgtcggttcatcgcttgtggcgaccttaacggaaatcactgaagtgaacccgctcgctccgcactacgtgtgcccgagctgccgatattccgaattctttaatgacggatcagtcggttccggttttgacctgccggataaaagctgcccgtcttgcggcacccctttgaaaaaggacggacatgatatcccgtttgaaacgttcttaggctttaaaggtgacaaagtacccgatatcgatttgaacttctcaggtgagtatcagccgcatgcccataactacacgaaagtattgttcggtgaagataacgtgtatcgcgcgggaacgatcggcaccgtcgcggaaaagacggcttacggatatgtgaaaggctatgcgggcgatcacaacctacacatgcgcggcgcggagatcgaccgtctggtgcaaggctgcaccggcgttaagagaacgaccggccagcacccgggggggattatcgttgtcccggattacatggatatttacgatttttcaccgatacaattcccggcagatgcgacggggtctgaatggaaaacgactcattttgacttccactccattcatgacaacctgctgaagcttgatatattggggcacgatgatccgaccgtcatccggatgctccaggatttaagcggaattgatccgaagacgattccgacagatgatccggaagttatgaagattttccaaggcacagaatcgctcggcgttactgaagagcagatcggctgtaaaacggggacgctcggcattcctgaattcgggacgcgatttgtgcggcagatgcttgaggatacgaagccgacgacgttctccgagcttgtccagatttccgggctttctcacggaacggacgtatggctcggcaatgcgcaggaactgatacacaacaatacgtgtgaactgagcgaagtgatcggctgccgtgatgacattatggtttacttgatctatcagggccttgagccttcactggcctttaaaatcatggaattcgtccgtaaaggcaaaggcctgacgccggaatgggaagaagaaatgaaaaagaacaatgtgccgaactggtatattgattcatgcaaaaaaatcaaatacatgttcccgaaagcccacgccgccgcatacgtgctgatggcggtgcggattgcatactttaaagtgcatcacgcgcttttatattatgctgcgtattttaccgtccgcgcagatgactttgacattgatacaatgattaaaggctcgactgccatcagagcggtgatggatgatatcagctctaaagggcttgatgcttcgccgaaggagaaaaacctccttaccgtgttagagcttgcgcttgaaatgtgtgagcgcggctattccttccagaaggtcgatctataccgttcgagcgcttcggaatttatcattgacggcaacagtctcatcccgccgttcaactcaattccgggactcggaaccaacgccgctctcaatattgtgaaagcgcggaaggaaggggagttcctttcaaaagaggatcttcaaaaacgcggaaaagtgtcaaaaaccattttagagtatttagaccgtcacggctgtcttgagtcgcttccggaccaaaatcagctgtctctgttttaagctttgtgcacagcctccgagcggagtttgatttgcattaaatatatggttatggtatagttttattggaaatgctaacgattaccgaggcaaagagtggggaaacccgctcttttgtattgaacaggcaattttgcctcgacatgtccatcgttttctcaatgcccctgctcttttgaagcagggtttttatgcagaggaacggctgatatgatatcgacagcacaaggaggaaaaacatgagcaaaaaagtgactgataccgttcaagaaatggctcagcccatactggatgaccttcagcttgaactcgtagacattgaatttgtcaaagagggtcaaaactggttccttcgcgtgtttattgattccgagaacggtgttgatattgaggagtgcgccaaagtcagcgaagcgttaagcgaaaagctggatgaggccgatccgatcactcagaactactttcttgaagtatcttctcctggagccgagcgtccattaaagaaaaaagccgacttcgaaaaatcactgggcaaaaatgtgtacatgaaaacgtacgaaccgattgacggtttaaaagtgtttgaaggcaaattggctgaatttgatggacaaactgttacaatagagatgacggtcaaaacaagaaagaaacgggtcaatattccgtatgaaaaaatagctaacgcaagattagctgtaacattttaatgaatgaagtattagtgtttaaggggggagaccgctaacatgagcagtgaactattagatgctctcactattcttgaaaaagaaaaaggcatcagtaaagacattatcatcgaagcaattgaagctgccttaatttccgcgtataagcgaaattttaaccaggcgcaaaacgtacgggtcgatctgaaccgtgagacgggcacgatccgcgtgttcgcaagaaaggatgtcgtagacgaggtatacgattcaagacttgaaatctcgcttgacgacgcccagcacatccatccgaactaccttgtcggagatgtcgttgaaatagaagtaacgccgaaagacttcggccgcattgctgcgcagacggcgaaacaagtggtgacgcagcgtgtccgtgaagctgagcgcggcgtgatttactcagaatttatcgatcgtgaagaagacatcatgacgggaattgtacagcgcttagacagcaagtttatttacgtgtctctcggcaagattgaagcgctgctgcccgtcaatgaacaaatgccgaatgagagctataaaccgcacgatcggattaaagtatttatcacaaaagtcgaaaaaacgacaaaagggccgcagatctatgtatcaagaacgcatcctggtctgttgaagcgtctttttgaaatcgaagtgccggaaatttatgacggaacggtcgaactgaaatccgttgccagagaagcgggcgaccgctctaaaatctccgtccgcactgatgatcctgacgttgatccggtcggttcatgcgtcggtcctaaaggccagcgcgtgcaggcgatcgtcaatgaactgaaaggcgaaaaaattgatatcgtcaactggtctgatgatccggttgaatttgttgccaatgcgctcagcccgtctaaagtgctggatgtcatcgtcagcgaagaagaaaaagccaccactgtcatcgttcctgattaccagctttctctggcaatcggaaaaagagggcaaaacgcccgcttagccgcgaaactgacaggctggaaaatcgatatcaaaagtgaaacggatgcaagagaccttggcatctatccgagagagcatgaagaagatgacgatttagagccgctctttatggagcctgaaacagccgaatcggatgaataagaggtgactttaggtgaataagcgaaaaaaaattcctctgcgcaaatgcgtggtaacgggggaaatgaagcctaaaaaggaactgatccgaattgtccgttctaaagaaggagagatttcagtcgatccgaccggaaagaagaacgggcggggtgcctatatcacccttgagaaagaatgcatcttagctgcgaaaaagaaaaacacattgcaaaatcaatttcaatcacaaatcgatgaccagattttcgaagaattgctggaactggcggaaaaggtgaaaaaataacatgtctggaatggaatggtttcccttgctgggtctggccaatcgagctcgtaaggtcgtgtcgggcgaggacttggttataaaagaaattagaaatgcgcgtgcaaaacttgttctgctgacagaagatgcatctgcgaatactgcaaaaaaagtatccgataaatgcaattattataaagtgccttataaaaaagtcgaaagccgcgcggatctcggccgctctatcggcaaggaatcacgtgtcgttgtcgccgtcactgaccaaggttttgcgaataagctgatcagcttgctcgattaatatttttgggggtgaacgaatggctaaaatgagagtttacgaatatgcaaaagccatcaatgtttcaagcaaggaaattttgactgcgctgaaaaacatggatatagtagtaaataaccatatggcaatgcttgaagaaaagaccattaagcagcttgatgcgaaatttaaaaaaggcggcgccggcgttacatctcagaagcctgcggaaacgaacaaaaacaagccgcaagggattaatcagcagcctgctgggaatcaaccaaacaaaattcgagacggaaagaagaatgacgtgcagaataatcaatttaacaaaaacaagaagaataacaacaacaacaaaaacaaaaacaaacgcaatcataacaacaaaaatcagtatcagcaaaaaccgctgaagccaaaaaaagagcttcctgagaaaattacgttttccggctctttaacagtcggagctttagccgaggaactgggcaaagagccgtctgaactcattaaaaaactgatgcttctgggcgtaatggctaccattaaccaggagcttgacaaagacacaatcgaactgatcgcatctgaatacggtgtagaaacagaagaagtgattgtgcttgaagaaactgagcttgaaaaatatgaagaggctgacaaagaagaagatcttcaaatccgtccgcctgtcgtgacgatcatgggccacgttgaccacgggaaaacgaccctccttgacagcatcagaaaaacaaaagttgttgaaggtgaagccggcggaatcacccagcatatcggggcttaccagatcgaagaaaacggcaaaaaaatcacgttcttagatactccgggacacgcggcgttcacaacaatgcgtgcgcgcggtgcggaagtaactgatattaccattttagtcgtagcggctgatgacggcgttatgccgcagacagtcgaagccatcaaccatgcgaaagcggctgaggttccgattatcgttgccgtgaataaagtggataaagaaagcgcgaaccctgaccgtgtcatgcaggagctgactgaatacggactcgttcctgaagcatggggaggagaaacgattttcgttcctctgtccgctcttacaggcaagggaattgacgagcttgtcgaaatgattctgcttgtcagtgaagtggaagagctgaaagccaatccgaaccgtcaggcaaaaggaacggttattgaagctgagctcgataaaggaagaggatctgtcgcgacacttctcgttcaaacgggaacattgaatgtcggagatccgatcgttgtcggaaatacattcggccgcgtgcgggccatggtcaatgatctcggccgccgcgtgaaaacagccggaccgtccacacctgtagaaattactggcttaaacgacgtaccgcaggctggcgatcaattcctcgtctttaaagacgaaaaaacagcccgttctgtcggtgaagcacgcgcttccaagcaactggaagaacagcgcagcgacaaagcgaagctgagcctcgatgatctgtttgaacaaattaaacaaggcgatgtcaaagacatcaatttaatcgtaaaagctgacgttcaaggttcagccgaagcgttaacagccgctctccaaaaaattgaagtagaaggcgtaaaagtgaaaatcattcacacaggcgtcggtgcgattacggaatcagacatcattctcgcatctgcttcaaatgcaatcgttatcgggtttaatgtgcgcccagacggaaatgctaagagcacggctgaagctgaaaatgtagatatccgtcttcaccgtatcatttacaaagtcatcgaagaaattgaagcggcgatgaaaggaatgcttgatcctgaatacgaagaaaaagtcatcggccaggttgaagtgcgccaaacattcaaagtgtcgaaaatcggcacgattgccggcggatatgtaacagacggccacattacacgtgacagcggactccgcctgatccgtgacggcgtggtcatcttcgaaggggaagtagacgttctgaaacgcttcaaagatgatgtgaaagaagtttcgcaaggatatgaatgtggtattacaattaagaaatacaatgacattcgcgaaggcgacatccttgaagcgtatgtcatgcaggaaatcgaaagaaagtgatcggatttgcggaatgtgaatgcatcatttatgatgcgggatcattaaaggagaaacgagccgttctgaagcggattataacgagggttcagaataagttcaacgtgtcggccgcagaaatcggctatcaggacacttggcagcggaccagcttcggaatcgccgtcgtctcctcctctcacgttcaggcggaaaaggagatccagcgcgtactcgcgtttattgactcctttcccgaaatagaacggacgatcactagaacagagtggttttaacttagaggtgattgaattgagtatgagagcaaaccgtgtcggcgagcagatgaaaaaagagctcggggatattatcagccgaaagctgaaagacccgagaatcggatttctcactgtaacagacgtacgtgtttcaggtgatttacaaatagcgaaggtgtatatctccgttctcggcggagagaaaaagaaagaagaggcgctgaaagggcttgagaaagcgaaaggatttatccgttccgaaatcggcagccgaatcagactccgcaaaacgcctgagcttgaatttgaatttgatgaatcaattgagtacggcaaccgtattgaaacattgattcacgaactgcattcagataaaccgtctgaataacaaggaaagaggatgggcgagtgtcgtctgtcctcttttctgcgttttacgggatacaattgataacaaaggagcgaaagacatatggttaacggagttctccttttacataaaccggtcggcatgacttctcacgactgtgtaatgaaaataagaaaactgttaaaaacaaagaaagtcggacatacgggaacgcttgatccggaagtgtcaggcgtactgccgatctgtgtcggacgggccacaaagattgttgagtacgtcaccgacaagtcaaaaacgtacgatgctgagatcactctcggcttctccacatcgaccgaagaccagactggagaaacggtcagcgtaaaacctgtcaaggagccgctgaaagaagcggatatcaaagccgttttagacgaactgaagggaccgcaggagcaagtgccgccgatgtattccgctgtaaaggtcaacgggaaaaagctctatgaatacgccagagccggtattgaagtggagcggccgaagcggaatatcacgattgaagatatcgcgctcacttcccctgtcacttataaagaagacacagcatcattccgctttacagtcacgtgctcaaagggcacttacgtgagaacattggcggtgacaatcggtgaaaaactcggctatcccgcgcatatgtcgcatctcatccgcaccgcttccggcgatttcagccttgatgagtgtttcacgtttgaggaacttgaacagcaggtttcagacggaacggttgcagagcatgccgtgccgatcgatagagcgctcaatcatttgccgaaatgggtcataagtgatacattagctaagaaagctgaaaacgggtcagtgtttgacatcccggcggaattttctgcaatgacagctgacgcccgtatagcggtctgtactgaagacggagaatgtgtggccatttatatgccgcatccttcaaaaaaaggactgctgaaaccggctaaagtgctcatgcaaaaaagcgaacaataagaaaaaaggtgaccgttctgtgaagacgatacatatttctcatccgcatcatttacaaaaagaagagcagccggcgtctgtcatggcgctcggctactttgacggcgttcatttgggacaccggaaagtaatcggaacagccagacaaattgccgaagaaaaaggcctgtcgctggccgttatgacgtttcatccccacccttcccatgtgttgggcagggacaaagagccaaaggatctgattacgccgcttgaagataaaatcagccagatcgggcgtttaggcgctgatgtgctgtatgtcgtaaagtttgatgaagcgtttgcgtctctgtctccaaaacagtttgccgaggagtatattttagggttaaacgcgcggcacgctgtgggaggcttcgattttacgtacggaaaatacggaaaaggcacgatggagacgctgccggacgatttaaacggcaaggccggatgcacgactgtcgagaaacagaccgagcaggacagaaagatcagctccacttatatccggtcagcgctgcaggatggtgacgttgaacttgcgcacactcttctcggccagccgtattttgtccggggcactgtgattcacggagacaaaagaggtcgcaccatcggttttccgaccgcgaatgtcggcctgcacaacagttatatcgtgccgccgacaggcgtgtatgcagtgaaagccgaaataaaaggcgaggtgtatgaaggcgtctgcaacatcggctacaaaccgaccttttatgaaaagcgtcccgatcagccgtcaattgaagtacatttgtttaattttcaacaggatgtatacggagaagacgttaaaatcgagtggtacaaacgaatccgaagcgaacggaagtttaacggcatcgatgaactgacggctcagatcgggaaagacaaacaagaagcgatccgttttttcagcaaataacggaaaaaacatcaaaagtacacaaattttcttctaaaagatttgcatatgggcgcgatttttagtatcatatgtttcgtagtcttaaaaccattgcttggcaatccgaagtcaccgacggttgctaggtaactggggctaattatgatatggaggtgaaacaggatggcaattactcaagagcgtaaaaatcaactcatcagtgagttcaaaacacacgaatctgatactggatctccagaagttcagatcgctatcctaacagactcaattaacaacttgaacgagcatttgcgtactcacaagaaagatcaccactcacgtcgcggtcttcttaaaatggtaggtaaacgtcgtaatcttcttacgtatctgcgtaataaagacgtaactcgttaccgtgagttaattaacaaactaggcttacgtcgataatcgtaaaaagcgggaggattcccgcttttttatcgtattaaagcgaaaaaaataataataaaaaaacaatgaaatccttttacatactactttgacattgatatgttcaattcatttcgttcataataggagtaattgattatttcacacattaagagaggagctcgtaatcgaatgggacaagagaaacatgtctttaccatagattgggccggcagacagcttacagtagaagccggccagcttgccaaacaggcaaacggcgctgtcatggtccgctacggcgatactgcagtgctcagcacagcaaccgcatcaaaagaaccgaaaccgctagattttttcccgcttaccgttaactatgaagaaagattatatgcagtaggtaaaattccgggcggttttattaaaagagaaggccgtccaagtgaaaaggccgttttagccagccgtctgattgaccgtccgatccgcccgcttttcgcagacggattccgcaacgaagtacaggtcatcagcattgtcatgagtgttgatcaggactgctcatctgaaatggctgcaatgttcggttcatcactcgctctttgcgtttccgatatcccgtttgaaggcccgatcgcgggtgtgacggtaggccgcattgacgggaaattcgtcatcaatccgacggttgaccagcttgaaaaaagtgatatcaacctcatcgttgcaggcacaaaagacgccatcaacatggtggaagccggagcggatgaagttcctgaagaaatcatgcttgaggcgattatgttcggtcacgaagaaattaagcgcctgatcgcattccaagaagaaatcgtcgcagcagtcggcaaagagaaaacagaaatcgaactgtatgaaattgacgaagagctcagcgaaaaagtaaaaagccttgcggagccggatcttctcagcgccattcaggttcacgaaaaacatgctcgcgaagacgcgatcaatgaagtgaaaaatgcagttgtcgcgaaattcgaagaagaagagcatgatgaagatacgattaaaaaagtgaaacagacactgtctaaactcgtgaaaaacgaagtgcgccgtttgatcacagaagaaaaagtccgtccggacggacgcggtgttgatcagatccgcccgctttcttcagaagtcggccttcttccgagaacgcatggctccgggctgtttacgcgaggacagacgcaggcgctcagcgtttgtacattaggcgcccttggggacgttcagattcttgacggtttaggcgtggaagaatcaaaacgctttatgcatcattataacttcccgcagttcagcgtaggggagacaggcccgatgcgcggaccgggacgccgtgagatcggtcacggtgctcttggagagcgtgcgcttgagccggtcattccgaatgaaaaagacttcccgtatacggtccgtctcgtatccgaagtgcttgaatcaaacggttccacttcacaggccagcatttgcgcgagcacgcttgccatgatggacgcaggtgttccgattaaagcccctgttgcgggtatcgcgatgggacttgtgaaatcaggcgagtactatacggtattaacggatattcaagggatggaagacgccctcggtgacatggactttaaagtagccggcacggaaaaaggcgtgacagcgctgcaaatggacattaaaattgaaggcctttcaagagaaattcttgaagaagcgcttcagcaggcgaaaaaaggaagaatggaaatcttgaacagcatgctcagcacgcttggtgaatcaagaaaagaactttctcaatatgcgccgaaaattttaacgatgaacattaatccggataaaatccgtgacgttattggaccgagcggtaaacaaatcaacaaaatcattgaagataccggtgttaaaattgacattgaacaagacggcaccatctttatttcttctactgatgaaagcagcaaccaaaaagcgaaaaaaatcatcgaagatcttgtcagagaagtcgaagtcggccagctttacctcggtaaagtcaaacggattgagaaattcggcgctttcgttgaaatcttcagcggaaaagacggtctcgttcacatctctgaactagcgctcgaacgggtcggcaaggttgaggatgttgtgaaaatcggtgacgaaatccttgtgaaggtaactgaaattgacaaacagggacgagtgaatctgtcgcgtaaagcagtgctgcgcgaagagaaagaaaaagaacaggaacaacaacaatcttaaatgaaaacctaacaaggagcctgggagacccggcttctttattttgagaaagacaacagacgggttctaccttgtcctcctcatacataatttgtggtgaggggggaaggacatgttgaaaaaattcgtgccgtttgccgtttttttatttcttttttttgtttcgtttgaaatgttaaaaaatccgtatacagttgattacatagacgcaatgaaaaaagacgctgtaactgtgtcagcatcaaaagatccgctctatgaagaattactgcaaaaagcgtcagagtatgaagtgaagccgcaagacgcgcggattgataaaatatggaagagtataccgggatataacggtttaaaagtcaatgtggaaaaatcctataaacaaatgaaaaaggacggagaatttcacgaagacggccttgtctatgagcaggtaaaaccgaaagtccatcttgattctctcgcgcccgaacccatttataaaggaaatcccgacaaaccaatggtcgctttcctgataaatgtcgcctggggaaatgaatacgtggagcaaatgctgcctattctgaagcagcaccaggtcaaagcaactttctttcttgaagggaaatggctgaaaaacaatcaggaactggggaaaaaaatagcggcagacggacatgaaatcggaaatcattcatacaatcaccctgatatgagcaaactgacttcaggaagcatttccgaacagcttgacaaaaccaatgcacaaatcagcgagacgctcggcataaagccgaaatggtttgcgccgccaagcggcagcttcagaaaagccgtggtcgatcttgcggcggaaaaaggaatgggcaccatcatgtggaccgttgacaccattgactggcaaaaaccgtctccggctgttttacaaacaagggtgttgagcaaaatacataatggagccatgattttaatgcatccgactgatccgactgcgaaaagcctggatacactgattgcaaaaatcaaagaaaaaggctacgcgctcggctcagtgtctgacttaatggatgaaaacaggctgatgaagtagcaggcggcagttgcctgtctttgaataggaggaacagacttgataaaacgctatacatgccaaaacggtgtaagagttgtgcttgaaaataatccaacggtgcggtctgtggcaatcggcgtatggatcgggacggggtcacgtcatgaaacgccggatacaaacggtatttcgcactttcttgagcatatgttttttaaaggaacaaataccaggtccgcacgtgaaatcgcagaatccttcgatcggataggcggccaagtgaatgccttcacttcaaaagaatatacgtgctattacgccaaagtgctggatgagcatgcaaactacgcacttgatgtgctggctgatatgttctttcattctgcttttgacgaagatgagctcaaaaaagaaaagaacgtcgtatatgaagaaatcaaaatgtatgaagacgcgccggatgacattgtccacgatctgctgagcaaagcgacatacggcaatcattcgctcggctacccgattctcgggacggaggaaacgctttcgtcatttaacggcgattctctcagacagcatatggatgacttttacacgccggaccgcgtcgtcatttctgtcgctggaaatgtaacggaacaattcattaaagacgtggagaaatggttcggtacatacgaagcgaagggcaaagcaagcggcatcagcgagcctgagtttcattatgaaaagctgaccagaaaaaaagacaccgaacaggcgcatctctgtctcggtttcaaaggcctgaaagtcggagacccggacatttacgatttgatcgtcttaaacaacgtgctgggcggaagcatgagcagccgtcttttccaggatgtgcgcgaagataaaggactggcctattctgtatacagctatcacagttcctatgaagacagcggtatgctgacgatttacggaggcaccggcgcgaatcagctcggacttctgtctgaaaccattcaggaaacgttatcggttctaaaacgtgagggtatcaccccgaaagagctggaaaacagcaaagagcaaatgaaggggagcttaatgctcagcttagagagcacaaacagcaaaatgagccggaacgggaaaaacgaactcctgctcggaaagcataagaccatggatgaaattatcactgaattaaatgcggtcagcctggaaagcgtcaacggcctcagccgccgcttatttacggatgattacgcactatcgctcatcagcccgaccggcaatatgccggcctcgtcttaagcggaaaagcagtctgcctctacggggcaggcatttttttttgctccgggtcatatagtacaagggggtggctatcatgaggctcagtgaactttcaggtaaagaaattgtggacattaaacgggcagagcggctcggcgtgctcggccagaccgatttggaaattaatgaacaggacggacaaattaccgcgctgttgataccgacggtaaaatggttcggattgcgaaaacaaggccacgacatccgcgtcccctggaaccatatccaaaaaatcggatcagacatgatcattttagacgttccgggggagatcacgcctcccgaagagtagatcttattcattttttgcaagcaccggctcatacagccggtgcttttttcatgaaaaagacgctgtacattcaccgccctttctctttgcacatacgatgaagaggaggatgacacttaaaagatccagtaactgtaaagaaggtgaacgtttcagatgttaaccggattgacaattgcgatcattggcggtgacgcaagacagcttgagattataagaaagctgacagaacagcatgccgatatttatcttgcagggtttgaccaattggatgacggttttacaggaaccgtcaaatgcaaaatcgatgagattccctttcaaaaaatagacagtatcatcctgcccgtatcggcaacgaccggagaaggcgttgtttccacggttttttcaaatgaagaagtggtattaaagcagagctatcttgagcggacaccggagcattgcgtcatttattcaggcatctccaacgcgtatcttgaggggatcgccagcgaagccggccgcaaacttgtgaaattatttgaacgggacgatatcgcgatattcaactcgattcccactgttgaaggaacaatcatgatggcgattcagcatacggattataccattcacggatcaaatgtcgccgttctcggcatggggcgcaccggtatgacgatcgcccggacgtttgcggcgttaggggcgaaggtaaaagtgggcgcgcggagttcggctcatttggcccgtataacggaaatggggctttctccttttcaacttgaagagcttactgaacatgtaaatgatattgatatctgcattaacaccgtaccgagcttgattctgaatcaaagcgttttatcgcgcatgacgccgaagaccttgattttggatttagcatcccgtccgggcggaacggatttcaaatatgctgaaaaacaaggcattaaagcgctgcttgctccgggtcttccgggaattgtggccccgaaaacagccggacagattattgcgaacgtattgagcaagcttttggcagacttaaagaaagaggggaaataaccatgtctctgaaagggaaaagaatcggattcggattaaccggctcgcattgcacatatgaggaagtttttccgcaaatagaggcgcttatcagtcaaggagctgaagtccggccggtcgtgacatcaaccgttcaatcgaccgatacccgctttggggaggggggagattgggtcagaaaaattgaagaagcaacaggctttgaggcgattgattccatcgtaaaagcggagcctctcgggccgaaacttccgctcgactgcatggtcatcgcccctttaaccggaaattcaatgagcaaactcgcaaatgcgatgactgacagccccgtccttatggctgcgaaagccacgatccgcaacggccgcccggtcgtgctcggaatttcgacaaacgacggactcggtttaaacggaacgaacttaatgaggctgatgtccgcaaaaaacatatatttcatcccgttcggccaggacgaccacgtgaaaaaaccgacatcgctcgtcgccagaatggatctccttccgattacggtagaaaaagctcttttgcaccaacaggttcagccggtgctcgtacaccaccatgaataaaaaatcatgatgacagaaaatcattccggaataaaaaaattcgatcaatccgtgactattctatggtaaaataaaacgtaaaatgcaaagtcaattcaacaaatgatgcttaattggcggaaggagttttacagatgggaagaggattacacgtagcagttgtcggagcgacgggagccgtaggacagcaaatgctgaaaacactggaagacagaaactttgaaatcgaaacactcacactactatcctcaaagcgttctgctggtacgaaagtaacgtttaaaggcgaagaatatacagtgcaggaagctgttcctgaaagcttcgaaggcgttcatatcgcgttattcagcgccggcggaagcgtatcacaaagcttggcgcctgaggctgtaaaacggggagccattgtgattgacaataccagcgcattccgtatggacgaaaatacaccgctcgtggtgcctgaggtgaacgaaggtgatctgcacaaacataacggcattatcgccaaccctaactgttcaacgattcagatggtggctgcgcttgaaccgatccgcaaagcgtacggtttgaaaaaagtcattgtatctacttaccaagctgtgtccggggccggcaatgaagcggcgaaggaattgtacagccagacaaaggcgattttaaacaatgaacctgcagaaccgtccattatgccggttaaaggcgacaaaaagcattatcaaatcgcatttaacgccattccgcaaattgataaattccaagataacggctatacgtttgaggaaatgaaaatgattaatgaaacgaaaaaaatcatgcatatgccgaagctggaagtggctgcgacatgtgtcagactgccgattgaaacagggcactcagaatctgtttacattgagcttgaccgtgatgacgcaaccgttgaagatatgaaacagcttttaaaagaagctccgggtgttacgcttcaggatgatccggcggagcagctttacccgatgcctgctgattgcgtcggcaaacgcgatgtatttgtaggaagaatccgtaaagatttggacagagcaaacggttttcatttgtgggttgtttctgataacctgttaaaaggcgccgcttggaactcagttcaaatcgcggaaagcctgcaaaaactgaacctcgtataaaacaaacgtattttctataggcgaacagaagagagtaaggctctgcctgctctcttctgttacgtcagactaatttggagtgaaaatagtgaagatcattgttcaaaaattcggcggaacatccgtaaaagatgacaaaggccgcaagcttgcgctagcacacattaaagatgccatcagtgaaggttataaagttgttgttgtcgtatcggcgatgggaagaaaaggagacccgtacgcgacagattctttaatcgggctcctttacggcagccagtccgacatttctccgagagagcaggatatgcttctgtcttgcggagaaacgatttcgtccgttgttttttccagcatgctgaaggaaaacggcataaaagccgcagctttaacaggagcccaggccggctttttaaccaatgcccagcatactgacgccaaaattatagaaatgaaaacagagcggcttttcgctgcactcgccagccatgacgctgtcgttgtcgcgggatttcagggagcgactgaaaaaggcgacacgacgacgatcggcagaggaggaagcgatacttcagcagcggcgctcggcgcggcggtagatgctgagtttatcgacatttttacggacgtggaaggcgttatgacagccgatccgagaatcgtggaaaatgctaagccgcttccgaacgtcacatatacggaaatctgcaaccttgcctatcaaggcgcgaaagtcattcatccgcgcgcggtggaaatcgccatgcaggcaaaggtgccgatccgcgtgcgctccacttattcaaaagacaaaggcactttggtgacgtcccatcattcgtctaacatcggcagcgatgtattcgaacggctgatcacggggatcgcccatgtgaaagatgtgacgcaatttaaggttcccgccaaaatggggcaatacaacgttcagactgaagtctttaaagcaatggcaaatgccggaatcagcgtagatttctttaacattacgccgagtgaaatcgtatataccgtagccggcagtaaaacggaagccgcgcgcagcattttggctgaattaggatatgagccgacagtgacggaaagctgtgcgaaagtgtcagcggtcggcgccggaataatgggtgttccgggtgtcacgtctaaaatcgtctccgcactttctgataaaggcattccgattctgcaatctgccgacagccatacgacgatctgggtgctcgttcatgaaaaagatatgataacggccgtaaatgcgctgcatgaagtgtttgaactttcaaagtaaatgtgattgaatcatgatgaggtgaaaaaaatgaatgtcggaaatatatctacagcgatgattaccccctttgacagtaaagggaatgtagactttcaaaaactgtctacattaatcgactatttgttgaaaaacggcacggattctttagtcgtcgcaggcacgaccggcgaatctccgacactttcaacggaagaaaaaattgcactctttgaatttacagtcaaagaagtgaacggacgcgtgcctgttattgcgggtacgggaagcaacaatacgaaagactccattaaactgacaaaaaaagctgaagaagccggcgtcgattgcgttatgcttgtcacgccgtattataataagccttcccaagaggggatgtaccgtcattttaaagccattgcggaagaaacgtctcttcctgtgatgctttacaacgtgccgggcagaacggtcgcttcgcttgcgccggaaacggccatcagacttgcggagataccgaatatctctgcgattaaagaagcgagcggcgatcttgatgccattacgaaaatcattgccgaaacaccggaagatttttacgtctattcaggtgatgacgggttaacgcttcctattctcgcagtcggcggaagaggagtcgtgtcagtggccagccatatcgtaggttctgacatgcagcagatgattaaaaactatacgaacgggcagacggcaaccgcggcactgattcatcagaagcttctgccgatcatgaaggagctctttaaagcgcctaatccggctccggtcaaaacggcgctacagctgaaaggccttgatgtcggatctgtgcgtcttcctcttatcccgctgaatgaagatgaacgtctgagcctgagcagcgtcatcagcgaactgtaagaaaaaatttatacagttaaaatacgcggtcattctcatttttatcgtgagtttgaccgttttgtatacatattggttttccctaaaccttccgcttcttcttgttttctaaaattgatatcagttataataggaacaagtgatgatggacgggtatgagactaggaggatacagattttgaaaaagaaaaatacagaaaacgtcagaattatcgcccttggcggcgtcggagaaattgggaagaacctatatgtcattgaaattgactcagacatatttgtagtggatgcagggctgatgcaccctgaaaatgaaatgctcggtattgatgtcgtcattccggatatttcctacttagtagaacgggctgaccgcgtgaaggccatctttctgacacacgggcacgatgaaaacatcggaggcgtcttttatttattgaacaagctgtcggtgccggtatacggaacgaagcttacgcttgcattactgagagaaaaactcaagcagtacgggcataatcgaaaagctgatttgcgtgaagttcactctaaatcagtcattacatttgaatcaacgaaagtatcgttctttaaaacgattcacagtattccggattcagtgggagtcagcttcaaaacatcacttggctctattgtatgcacgggagactttaaatttgaccagacgcctgcttatcaccaatcatgtgatattggcgaaattgccaaaatcggaaacagcggcgtgctcgccctgctttctgacagcgccaatgcggagcgcccggggtatactccgtcagaagcatatgtaagcggtgaaatttccgatgcgatgaacaattcagaaaaccgtgtcatcattgctgtattcgcgtctaatatcaaccggatccagcaagtgatacaggctgccgtccagaacggccgcaaacttgcaatcgccggaaaaaatctgcaaaacgtgcttcagcttgggcgcaagctcggctatattgaagccgaagatgaaatgtttattcctgtgcaggatgtgaaaaaatatccgaagcgggaagtggcaattgttacagccggaagccatggtgagccgctggccgctcttacgcggatggccaagcaggcgcacaagcagcttaacattgaagaaggagacaccgttgtcattgcatcaacaccgattccggggcatgaattgatatattccaaaaccgtcaacctgcttgcccgagccggcgctcaagtcattttcgcccaaaaacgcgtgcatgtgtccggtcacggttcgcaggaagaattgaaactcatgcttaatttgctgaaaccgaaatatttaattccggttaacggtgaattcagaatgcaaaaagcgcattccaaaatcgcagaagagatcggcatgaaacgcagcgacattttcttgattgaaaaaggtgacgtcgttgaattccgcggccagaatgtgaaaatcggggataaagtcacgtacggaaacgtgttgattgacggcctcggagtcggcgacatcggcaacatcgtgctgagagaccgccgcttattatcacaagacggcattctcatcgtcgtgatctcactcgataagcagaaaaagaacctcgtatcaggtcctgagatcattacgcgcggtttcgtatatgtcagagaatcagaaggtttaattgtacaagctactgagctcgtccgctctatcgtgactgaagcgacggaaacatctgccgtagaatggtccacgctgaaacaagcaatgcgtgatgcgctgaatcaattcctttatgaaaaaacaaaacgcaagccgatgatcattccgatcattatggaagtataatgtatacacagccggagtgcatgatgctccggctttgtttttgttcatgtcccggatggaaatcatcatctttgttcataatacaaagagacattcggaaagggtgaaagataaaatggatcatcgtatggaaaacaccgaagaacagcagcccgaaaaatcagatgcgaaagacagcattatgagcaaaattcagcagctgggagagacatctctgccgcaaatgtcccaagataccaatattcactgcctgacgatcatcggccaaattgaggggcacgtccaactcccgccgcaaaataaaacaaccaaatatgaacacgtcattccgcaaatcgtcgccattgagcaaaatccgaaaatcgaaggacttctgatcatcttaaacaccgtcggaggcgatgtggaagcggggcttgcgattgcggaaatgctcgcatccttatcaaaaccgaccgtctcaatcgtactcggcgggggacactcgataggtgtgccgatcgccgtgtcatgtgatcatagttttatcgcggaaacagcgactatgaccattcaccccgttcggcttacaggtctggttatcggggttccgcaaacatttgaatacttggacaaaatgcaggagcgggtcgtcaactttgtgacccatcattcaaatatttccgaagaaaaattcaaagagctgatgttttcaaaaggaaacttaaccagggacatcgggacgaacgtagtcgggaaagatgcggctgattacggattaattgatgccgtgggcggcgtcggacaggcgataaaaaagctgaatcagctgattgaggaacgaaagggcgaggaaggaaggatgattcaatgatcctttataccgtcatgccccaagaagtcgtttacggtcaggatatagagcaaagcgtgcatgaacaggtagattacgccggcgtgccgctgctagttgagatgaagggaaatgaagctgaagtcgtacagattttaagtacgaacccgatggatttcttgaatccggacatcgctccgggacaaaaaatcaagctgaaaatctaaccggcattcagtccgtttctcgggggcaaaatatgctataataggggaatcctacagaaaaatgcagccggcaaaaggctgcttttcttcatgatgtatgattttacattttttaacgcagtaaggtgatgagtgtggcaaagaaaaaacggaaatctaaaaagaaacaagagagtaagctcaatctaaaatacgaactaagcggactgctctgtgttgcaatctcgattattgctgttttgcagctcggcgttgtgggacagacatttgtgtacttgttccgtttttttgccggagagtggtttattttatgcttaattgcgctcttccttctcggaatttcgctgttttggaaaaagaagagtccaagccttttaacgagaagaaaggcagggctgtactgtattatcgccagtatattgctgctgtctcacgtgcagctctttaaaaatctgtctcatcacgggtcgattcggtcggcaagtgtcatcggcaacacgtgggagctgtttatgattgacatgaaacagcaggctgcttcccctgatttgggcggcggcatgatcggcgcggtactgtttgcagcttcccactttttatttgcatcaacgggttcacagatcatggcgatcgtgctgatcttaatggggctgattcttgtaacgggccgttcactgcaggaaacgctcaaaaagtggacgagccccgtcggccggtttatccgcagtcaatggcaggcatttcttgaggatatgaaaacagtcagaacgaacatgtcttcgccgaaaacaaaaacaaaatcgggcaaaaaacaaaaacgggttcaaaagaaaaaagaagagcctgaaccggaggaagaggatgaggaaatcatttcgccgatcatccattcagagccgattatttcaagcttttcagaccgtcaggaagagcccgccgaaccgctgatcccggaaaaaacgcaggaggctgcacaagcggcaaaagatgagccttccggcggcgctcaagacagtggcgaaacggctgcggctccgccgatgacgtttacagagcttgaaaataaagattatcaaatgccttcactggacatactggctgacccgaaacataccggccagcagaccgataagaaaaacatttacgagaatgcaagaaaactcgaacggacttttcaaagcttcggcgtaaaggcgaaagtgacgcaggttcatctcggtccggcggtcacaaaatatgaggtgtatccggacgtcggggtcaaagtcagtaaaatcgtgaatctgagcgatgacctcgcgctcgcgcttgccgcgaaggatatccggatcgaagcgccgattccgggtaaatcggcaatcggcatcgaggtgcccaatgctgaagttgcgatggtttcgttaaaagaagtgcttgaatccaagctcaatgacaagccggacgcgaagcttctgatcggcttgggacgaaatatttccggggaagccgtgcttgccgaactgaacaaaatgccccatctgctcgtagcgggggcaacgggaagcggaaaaagcgtctgtgtcaacggtattattacgagcattctgatgagggccaaaccgcatgaagtgaagatgatgatgattgacccgaaaatggttgagctgaatgtgtataacggcattcctcatctgcttgcgccggtcgtgacagatccgaaaaaggcctcgcaggctttgaaaaaggtcgtcaatgagatggagcgccgctatgagctgttctcccatacgggtacgagaaatatagaaggctataacgatcatattaagcggtcaaatgccgaagaagaagtcaagcagcctgagctgccgtacatcgtcgtcatcgttgacgagcttgccgatctgatgatggtcgcttcttccgacgtggaagattcaattacgagactttcacagatggcgcgggcggcgggaattcatttgattatcgcgacacagcggccttcagtcgacgttattaccggtgttattaaagccaacatcccgtcaagaatcgccttcagtgtctcatctcagaccgattcacggacgattttagacatgggcggcgctgaaaagcttctggggcgcggagacatgctgtttctgcctgtaggcgcaaataagccggtgcgtgtgcaaggggcattcttatccgatgaagaggttgagcatgtcgttgatcatgtcattacgcagcaaaaagcgcagtaccaagaagagatgattccggaagaagtttcggaaacacacagtgaagtaacggatgatctctatgacgaagcggtcgatttgattatcggcatgcagacggcatcagtctccatgctccaaaggcggttcagaatcggatatacgagagctgcccgtctgattgacgcaatggaggaacggggcgtcgtcgggccgtatgaaggaagcaaaccgagggaagtactattatctaaggaacaatatgatgagctctcttcttaaaaaggagagagttttcactgaaaatgatatcacccaaaatcattcctatttatttttttattaaaacatgatatagttgtcccaattgttcaataatttatgaaagtggtttacggaggggaaacatgtctacaaaagctgacaatcgtcacttgtatctaaaagtgattgagcgaatcaaagaggatatacaaaacggaatttacaccgaaaaggaaaagcttccttctgaatttgagctttcaaaatcaatgggtgtcagccgggcaactctgcgtgaagctttgcgtatccttgaagaggagcatgtgattatcagaaggcacggtgtgggcactttcgtccatacaaaaccgctgtttctttcaggtattgaacagctcaacagcgtgacgaaaacgattcagcaggcgaacatggtgccgggtacgatttttttgtcgtctcaggtcatcacgccgtctgatgaagatatcgctagattccggcttgagcctgagcaggagcttttttatttggaacgcgtgagaacggcaagcggcactccggtcgtttactgtttagatacgattccgatgcacattctgccgaattctttctgtcatgaacaggagtctatttttgatcttttggaaaaaaactccgggtctgtgatcagctatgccgttgctgatatcgaaccgatcggatatcacgatacgatttcaccggttttggaatgcgagccggagacggcgcttttattgctgaagcaaacccactataatcagaatgatgaacctgtgctgtattcattaaattatttccgggctgataagttcagttttcatgttgtaagaaaacgtttttaagacagacgcgtcatgtgtctgtttttttatttgccgtttcagtacatactttgttttctgcaaggcacaataaaacaggaaacaaccaagtatagtgaatgggtgaataagttgagtaagaagaaaaatggaacgaaaaatatcattgctctggcttctgtaccgctcgtgatgacactcgggaattccatgctgattcctgtgcttccgatgattgaaaaaaagctgtccatatcgtcttttcaagtatcgttaattataacggtctattcgattgtggcgattatttgtattccgattgccggatatctgtccgataaattcggaagaaaaaaggttcttctgccttgtcttctcatagccggtgcgggcggagcgcttgccgcgatagcttccaccgcgttcaagcatccttatcccattatcttggcggggcgggtgctgcagggaatcggttcggcaggggcggctcctgtagtgatgccgtttatcggtgatttattcaaaggggatgatgagcggattaccgcggggctcggcgatattgagacgtctaacactgccgggaaagtaataagcccgattctcggttcgctcttggctgcatggttttggtttatgccattttggttcattccgtttttttcgctcatcagtttttttctcgtattgtttttggtggcaaagccggaggaacaaaaagaagcgccttctatttccgaatttgtgaaaaatgtcggccgcatatttaagcgtgacggacgctggctctttacggtttttatcatcggctgcgtgattatgtttttgctgttcggggttcttttttatttatcagactcactggagaagaaatacggcattgacggtgtggctaaaggagcgcttttggcaatcccgcttttatttctatccgtcagttcatatatagcaggcaggaaaatcggaaaagaccaaggcaaaatgaagttttgcatcgttttcggaatgagtgccgtgacactgtcgtttatcggcctatggtggaatcacagtttttatttattatttatctttttgtgtgtcagcggtatcggtatcggaatggcattgccggctttagacgctgtcatcacagaaggcgtagacaacgaggaatcgggaaccattacctcattttataacagcatgcggtttatcggagtagcggcgggaccgccgatctttgctgccctgatgtcaaatgcgggctggctgatttttattttatccgctttttgcggcattgtgtctgtatttttagcgctgttaaatatctcatcacaagcaaaagaaaaaaaggaatcattaaagacggtgtaatctgcactgtctttttttattttattttgaagattgacatgataccgtcaagtcgttatcctttttaatagttaaacatattaactaccggaaggagggggaaaaggtgcatgaagaaaaagtaaagcagctgattcagcgttattccgatgtatacctgcatgtcttaaaaaaaattgacagcattatcgctgaaaaagtgaacaaagaactgacattggatcaatattacatcctccgctatattatgctcaatcccgattgcaaatcaattgaactggccgcggtgtgccacgtcaataaaagcgccattacatctatgacgaaccgcctgtatgaaaaaggctacatcaatagagaacgcagccaaagcgaccgccggagcatacttttaaatgtcacggaaaaggggacggaagtatttcaccgtgtggagcggcggattgaggaactcgtccgttcatatattatgtattttgatgaagacgaggcggagatgttcgtgaatacatatgaaaaattatatcgattgatgatgactgaggaggatcagcagacataatgaaaaacattatccgagcccgctggatcatcgccgcggtgtgggtcgccgcaacggtgatatttatgcttacagcgcctgatatggctgaattgacacgggagaaagggcagatttccgtaccggacggatattcctcttcttacgcccatgaattgcttgatgaaatgtctgattccgatgcaccgtcttcttctgccgtcatcgtatttcacgaaaaaggcttaatgacagacaaaaaaaatcgtctggaagaagccgtcagcactttgtctgaacataaaaaagcgcttcagattaaaacagtgacttcatacttcggggagaaaaatgacgacattaaaaaacagctgctatcaaaagacagacaaacgatgctcgttcagctgcagcttgatacatccaaaaacgatatcatcgaaataaaaaataaaattgataaacagctgaaaccgtacggcgtatcatacggcattacaggccaatcgctgatcgacgaagatgtgttaaaaagctcacaggacggcttgaaaaagactgaatatataacggtcgcttttatcctgatcgtgctgatccttgtatttcggtcagtggtcgctccgttcgtgccgcttttatcagtattgatatcttatttagtcagccagtcgattgtcgcatttttagtcgatcagctgaattttccgctctcaacttttacgcagatttttatggttgcgattatgttcgggatcggcacagactactgcattctgcttctcagcagatttaaagaagaactgtcgcatggcgctgatataagagaagcgatcgtcgtcacctacaaaacggccggaaagacggttttgtacagcggcggtgcggtgctgatcggatttgcctgcatcggatttgcgacatttaagctgtatcagtcggcagcggccgttgcggtcggtgtcgcggtgctgctgcttgcgctcatgacgatcgtgccgttttttatggctgttttaggaaaaagcctgttttggcctgttaagggcgatatttcccatcctcaaagcaaagcatgggaaacgtcagggcggttttcatttaaaaggccgctcatcagtcttgcaatcgttgcggtattcaccgtcccgcctatccttctttacaaagggtcgctgtcttacaacagtcttgacgaaatcggggataaatatgaatccgtccgcgcgtttcatacgatttcagacgcattcggcccgggagaacttcttccggccacagtcgtcatcaaaaatgatgagacattaaataccgaaaaacacctgattgatatcgaaaaaatcagcagagaacttgaaaaaacagagggtgtaaaaacggtcagaagcgccacgcgccccgctggaaacggattgaatcaattatttgtcacaaatcaggcaaagcagcttcaagaagggcttgataaaggcaatacaggacttgaaaaaatcacggacggattagggcatgccgcaaagtcgttagctgattcacagccgcagatcgaagagtcgggcaaaagcgtcaatcagcttattgacggaacattgtctctgaaatccgggctttctgatataggagaaaacctgaataaactgcaggctggcgtgaacgagaataaagccggcgtcgcccagatgagaaagcggattgaagagcaaaaacaaatgctgacttcacagctcaaacaaaacagcggtctcgcttcagaaacgcaaaacgctttaaaattggtaaaaaccgtcctgccgatgaaagatgaagccagcagacagcttgccgatttgaacaagcagcttgcccggctgccgtttgcaaaattggaagcgtcaataccgtcagtcaaaaccgatccctcttaccaagaaatcaaatcggcctttacgggtgtacagtcagccgtttccaaggcaaacgcggatgcagaagctttttctaaacaggtcgacagtcaaaaggctcatctgcagcaagcggaaaaacaatttgcccgactggcagccgctcagaagaagattgacactcaaattaacgcaatgatcaatggtctgaccagtattgaaaacggtctgcagcaagtgtcagacggacagggggctctcgcgggacaaatgccgcgccttgaatcggcggcaggacagctcgccgagggccagaaaaaaatgaagagcggtctcggtgatttttcttcccggctcagcgaactttcttccggccttaacgacagtgtaaaagggcttaagaaagtatcaagcggcatgatgggggcgaatgattacctgggtgagcttcacaaggcgtcagacaaagaaatgacaggctggtttgtgccgaaagacgcgttgacaaacagtgatttcacaagcgtgtttaatacgtacatgtcagatgacagaaaaacgacagaattgaccgtcgttcttgatcacaatccttactcaaatacggccattcaagatattcaagcgatcaaagcgagcgtaaaaagggccattccgaacacggatctgaagaatgcttccttcggcgtttcgggagtctccagcatgaatgccgatctgaaggaagtatcggattcagacttcaaacggacggccatgtttatgctggcgggaatttttctgattctcatcgtgatgctgcgctccctcattatgcctgtttatttagtggcgtcgctcgtactgacgtatttcgcatccatcggcgtgacggaatacatctttacacacttcttcgggtatccgggcgtaaactgggccgtgccgttcttcggctttgtcattttgatggctctaggcgtggattattccatctttttaatggaccgctttaatgagcttaaaaaagaaggaacggaacccgcaatgatcagcagtatgaaaaatatgggttccgtcatcatttctgcagccattattttagcgggaacctttgcggccatgctgccgtcaggcgttctttccttattacagattgcaaccgtggtattaacaggccttctcatgtacgcaattgtcgtccttccgttttttgtaccggtcatggtgaaaatattcggaagcgccaactggtggcctttcaatttgaaaaaataacgttcaatgcctctgcctgttttcgggcagaggttttttgtttccttataaatcctccagttgatataattacatctgcgcactcttttttgcgaatgctgaaatttggtcataatacatactatgaaagaatgaacgaaggaggtttcacatgacttacgtaaatgaaatgaagtcaaagcacggcgggatcaccgcccacatcgtaaagaccgagaaatttaaaaccgtttcgctgacgtttaaaatgctggctcctttaacgaaagagctcgtaacaaaaagggcgctgtttccgcatgtgcttctgcgcggaacagaaagccgcccgaaaaccgctgatctgcggtcttattttgatgaactgtacggcacatccgtttcagctgatctgacaaaaaagggagaacgtcatgtcattacgttcagacttgagattcctaatgaaaagtatctgaaggaccgcacaccgttattggaaaaaggccttcagcttttatcagagcttgtcttttcacccgctttggaaaacggcgccttcctgcccctttatgtcacgcaggaaaaacggacgctgaaacagcggattcaagccgtatatgatgataagatgagatattctaatctgcgtctcgttcaggaaatgtgcaaaagcgaaccgtatgcccttcacgtcaacggcgagttcgatgatgttgaacacattacaccgcaagatttgtatgaagcctatcaaaaagccatacgcgaagatcagctggacctgtacgtcatcggcgatgttgatacagatcaggtgaaaacggccgttgatacgtattttaaaacggaagaacgggagctgcagccttttgaaagaagcgcggcgaatgaacagcccgatccgaaggaagtcattgatgaagaggacgtcaagcagggcaagctgaatatcggattccggaccaatacgacatatacagatccggattatccggcattgcaggtgtttaacgggctgttcggaggtttctctcattcaaagctgtttataaatgtccgtgaaaaagcgagcctcgcctattatgcagcctcaagggtggaaagtttcaaagggcttttgatggtcatgtcgggcattgaggtgaaaaattacaagcaggccgtcaccatcattgaagaacagtttcaggctatgcaaaacggtgacttttcagaagatgatatcgcccaaacgaaagccgttattaaaaatcaagtattagaaaccattgatacggcatacggcttagcggaatttctgtatcagcaggcctcagcccaagtagagataccgatcgaaagattccttgacaatatcgagaaagtgacaaaagaggacattatcaatgtcggaaagaacattaagctggatacgacttatttcttaaaagggacggggggagcatcttgactaaaccgataaacttcgaacagcttcaggaaacgctgtatcatgaaaaaatggcaaacggccttgatgtctatgtgctgccgaaacagggctttaataaaacatacgccgtgtttacgacaaagtacggttccattgacaatcaattcgttcctttaaataaggaagaaatggtacacgtccctgacggaatcgcgcattttctggagcataaactgtttgaaaaagcggacggcgacgtgtttcaggacttcagtaagcagggggcgtcggcaaatgcctttacatcatttacacgaaccgcttatctgttctccagcacttctaatgtggagaaaaacctggaaacactcgtagattttgttcaggacccgtatttcacggaaaaatcagttgaaaaagaaaaaggcatcatcggccaggaaatcaatatgtatgatgataatccggattggcggctgtttttcggccttatcgaaaatatgtataaagaccaccccgtgaaaattgacattgccggaacggtggagagcatctcacatattacgaaagatctgctgtatgagtgctacgaaacgttttatcacccgagcaatatgctgctctttatcgtcggtcccgtagatcctgaagcggtcatcagccaggtgcgggaaaaccaggagaaaaagccgtttacagaccagcctgaaatcaaacgtgaagaagttcaggagcaggaagcggttttccgccgggagcaggaattaaaaatgaacgtgcaaggctcaaaatgtcttgtcggcttaaaggcgaaagacccttataaaacggggcaggagctgttgaagcacgagctcagcatgaacctcatgcttgaatgtctcttcggaaaaagctcaccgcattacggtgacttgtacgacaaaggctacattgatgaaactttcagctttgattacacggctgaatacggattcggttttgcctctgtcggaggagatacaccggagccggataagctcgctgacgaattaaaacacatgctgcttgatgcagaatcagccgtgactgcggaaaaacttgatcttgcgagaaaaaagaagatcgggtcattcttaaaagcgctcaattcgcctgaatatatcgccaaccaattcacacgctacgcctttttagatatgagtctgtttgatgtcgtaaccgtactggagcagattacgctggatgacgtaaagcgggtcattaaagaagaaatatcagaagacaggctgacagtctgcaaagtcgtgccaaaatcataacaaaaacatccctcacgccctgagggatgtttttctggggaaagaaggagtattgattgatgaaacagacagcgctcgtaaccggagcaagcggcggaatcggacaaagtataagtgaagtcctcgcaaaaaacgggtatgacgtccttttgcattatcattctaataaggaagccgcacacaggcttgcggaaaggctgagcgcatcattcggcgtaaaagcctccgttattcaggcggatctgtcctcaccggatggcgcggagacactcagccgttccgttaagcagcctgtggatgctctgatattaaacagcggcaaaagtcatttcggcctgattacggacgttacggatgacacggctcgggagatggtgcagctgcatgtaacgagtccctttcttttggcgcgtaatctgatgcccggcatgatccggaaaaaaagcgggggcatcatcgcgatcggttccgtctggggagaaacaggcgcatcgtgcgaggtattatacagcatggtcaagggagcgcagcattcgttcgtcaaagcgcttgccaaagagcttgctccgagcggcgtccgcgtgaatgcagtctcgccgggtgccgttgatacaaatatgcttgatcagttcacgtctgatgaaaaagaagcgttggcagaggaaattcccgcgggccggctggcaaagccggaggaaatcgccgaagcggcggcctttttattatcggacaaggcttcctatattacggggcatatattatccgtaaacggcggctggcactgctgaaaaaaatgtgtgtatagtttgcatctgtacggacaaaataattttgtaacaacagatgaaatggaggaacccaacatgtcagtattagaaaactgggataattggaagaatttccttggcgacagattgaactatgcgcaggaaaaagggatgagtgatgaaacgatcactgacctcgctacagaaatcggcggttaccttgcgaacgaagtcgactcgaaaaaccatcaggaaaaagtgcttgctgatctttggagcgttgcttctgaagatgaacagcgcgccatcgcaaatatgatggtgaagcttgttgaaaataacagcactcattaagaggggggatttctcctctctttttttatgttttcctctatagagcaacattcttctttctaattagagaaaaatgttttatgataaaggaaggtaaaaatttgccacaatggagggggtatatcatttggcaaagctcgaatggtattttgaatatgaaattcaagtgaaccgccccggcctgctcggggatatttcatctcttctcgggatgctgtcaattaatattgtcacaattaacggtgtcgacctttccagaaggggaatgctgctcagatgccggcatatagatcaaattaaacgattggaatcaattttaaaaacaatggagaccattaaagtaacgaagctgagagaaccgaggcttcgcgaccgtctcgcagtccgccacggaagatacattcagcgtgatgccgatgacaaaaaaaccttccgttttgaaagggacgagctcggtcttctggttgactttatggccgagctgtttaaaaaagaaggacacaaactgatcggaatccggggaatgccgagggtcggaaaaacggagtccatcgttgcgtcaagcgtttgtgccagcaaaagatggcttttcgtatcatcaacgctgctaaaacaaacgatccggagccagctggttgccgatgaatacagcacggaaaacgtgtttatcctcgacggcatcgtttcgacaagacggggatctgagcgccatcttcagctcgtcagtgaaattatgcggcttccggcgacaaaggtcgtggagcaccccgatatttttgttcaaaattcggagtatacgctcgatgatttcgattatattatcgaactcagaaatgatcctgacgaagttattacatatgaacatgcagaagaaccgcaaatatttgatcagaccggtttttcaagctttgatttttaatattggaaggtgtttgttgtgacagaattagcaatccggcttaaagaagccagagaggaaaaagggatgtcattggatgaactccaggcggcgacgaaaattcagaaaagatacttaaccgctctggaagaaggcaattatgacgtcattcccggcaatttttatgtgcgggcgtttatcaagcaatacgctgaagctgtcgggcttgattcagatcagttatttgaagaatataaaaaagacattcctaacacgtaccatgacgatgtgtcggaaaaaatctccggtctcgccatgcaaagggagcttcctaagtccgcttcaaaggcggcggaatggcttccgaccgtccttgtcgtcatcggtgtcattatcgtcatcgcgatcatttatgcgattattcagctcggaatgagcaaatccgggcagacagatggagataaggcagtcacccaaagtgagagcaagtatgagattcctaaggattctgcgctgaaaaacgacggcaatacaaatgacgaagcgcaatctgacagcaaaaaagacaaaaaggacacaaaagcgtcagagcagaagaaagaaaaaagcagtgaaaagacggagatcaaagcggccggaacggaaggctcggcttcttcatacaacgtctccggggcagataagtataagcttgaactgattgcttctgacagcgcatggatccgcgtccgtgatgacagcggcggttctttaaaagaaggaacgctgcaaaaaggcgaaacctttaaaaaagacgtcacggatcaaaagcagattgaaatccgcacgggctatgcccctaacctgaaaattaaaatcaacggagaggttctgtcctatgaactcaatccgcatgatgtgatggcgcagaccatcacaatcaagatgaaaaaataaaaggggaaaagtcatctgaacgattaagatgactttttcttcacgtccgagtacatatattggaggggctttatgtttaacttaccgaataaaatcacactggcaagaatcgctttaattcctgtatttatgattatcatgcttgttccttttcagtggggcagcgttcatataggggatgaatcgattccggtcgcgcatcttacgggagctgttttgttcattatcgcatcaacgactgactgggtggatggctactacgccagaaaactgaacctcgtgacaaatttcgggaaatttttagatccgctggctgacaaactgctggtgtccgcggcattaattacgcttgtgcagtttgaccttgcgccggcgtggatggtcatcatcatcatcagccgcgaatttgccgtaacgggattaagacttgtgctggcgggaacgggggaagttgtagccgccaatatgctggggaaaattaaaacatgggctcagatcatcgctgttgccgcgcttttgctgcataatcttccgtttgagctcgtttctttcccgttcggcgatatcgctttatgggtggccgtgctcttcacagtcatttccggctgggattattttgcgaagaactgggatgcgttaaaaacatctaactaagaaagaaggacttaaagatggaaatagcaaaaaaagcagaaatcattgcagtcggctcggagcttctgctcggccagatcgccaatacgaacgcgcagtttatcagtaaagagctggcggaaatcggtgtaaacgtgttttatcataccgctgtcggtgacaatccggagcggcttaagcaagtcatccgcattgccgaagagcgctcagacctgattattttttcaggcggcctcggaccgaccaaggacgatttgacgaaagaaaccattgcaaacacactggggcgcccgctcgttctgaatgacgaagcgttccggtcgatcgaagaatatttcgcgaaaacaaaacggaccatgtcgccgaataaccgcaaacaggcgctcgtcattgagggctcagacgttttggcgaatcatttcggcatggcgccgggaatgcttgcagagcacggctcaaggctttatatgctgcttcccgggccgccgagcgagctgcgtccgatgtttgaaaatgaagcgaagccgctgcttcttaaaaagctcggttctaatgagaaaatcgtttcaaccgtgctgcggtttttcggaatcggtgaatcccagcttgaagctgatttagaagatatcattgatgcgcagacgaacccgacgattgccccgctcgctgctgacggagaggtcacgctgcgtttaacggcgaaacatgccgacgaaaaagaaacagaacggcttttaaaagaaacggaagccgccattttagaacgtgtcggtgaatttttctacggatatgatgatacgtctctggtgaaggagctttcaaaagcatgcagacaaaacggaattacgatttcttctgccgaaagctttacaggcggcctgttttcagagtgggtgactgatttaagcggtgcgtctcaactatttgcagggggcgttgtctgctattccgacagcgtgaaacagcatgtgctcggcgtgaaagctgagacgctcgcagaaagcggagcggtcagcaaagagtgtgcgaaagagcttgcagccggtgtgagaaagctgaccggaagcgatatcggcatcagctttaccggggttgcgggtcccgacccgcaggaagggcatgcgccgggccgcgtctttatcggcatttcagcggaaggaaaagaagaggtgcacgaatttaactttgccggctcaagaaccgggatcagaaagcgcgccgctaaatacggctgccatctcattttaaaaatgctggatcaaaaataaagttttaaagagccgttttctctgatttttaagttttataagggaaattatgctcttttgcagaaaagcgaacgcggaaaaaatccgaatatgcgttcgcttttttcttggcaaatgccagtaaacaaggtatagtatatgtagtggcaagataaaggaggaaaaaataaatgagtgatcgtcaggcagccttagatatggctcttaagcaaatagaaaaacaattcggcaaaggttccatcatgaagctcggagaaaaaacggatacaagaatttcaacggtgccaagcggttcccttgcacttgataccgctctcggaataggcggatacccgcgcggacggattattgaagtatacggacctgaaagctcaggtaaaacgactgtagcgcttcacgcaatcgctgaggttcaggaaaaaggcggacaggcagcatttattgatgctgagcatgctcttgatcctgtttacgcgcaaaagctcggtgtcaatatcgaagagcttctgctttctcagccggatacgggagagcaggcgctagagattgctgaagcgctggtgcgaagcggagctgttgatatcgtagtcgttgactctgttgcggcgcttgttccaaaagctgaaattgaaggtgacatgggtgattcacacgtcggtttacaggcgcgtctcatgtctcaggcgctccgaaagctttccggcgccatcaataaatctaaaacaatcgcaatctttattaaccagattcgtgaaaaagtcggcgttatgttcggaaatccggagacgacaccgggcggccgtgcgctgaaattctattcttccgtgcgccttgaagtgcgccgtgccgagcaattaaagcagggcaacgacgtgatggggaataaaacgagaattaaagtcgtaaaaaacaaagtcgctcctccgttccgtacggctgaagtggacattatgtacggtgaaggaatctccaaagaaggggaaatcatcgaccttggaactgaactggatatcgtgcaaaaaagcggttcgtggtattcttatgaagaagaacgtctcggtcagggccgtgaaaacgccaagcagttcttaaaagaaaataaagacatcatgctgatgattcaggaacaaatccgtgaatattacggtttagacaataacggtgtaacggacaaagcggaagaagttcaggaagagatggaattagaagaataaaaacacgatcaaaagagcggaataagcaatttccgctctttttttgtgtgtttcaaaaaaacactggctgtttcggaaaattttatctggaatgttacaacttttttcaccctttactcgtctaacatcatggcgaaagttgaaattatatctgaggaggaaaaaagatgacgagcccccgccgcacaagaataaataaaaaaagaaagaagaagctgatgaaaacgggagggctgtttctttttctgctgcttgtcactgtttttattatgatctggaccgtcacagcgcatcaccgggagaaggaatccgttaaaaacgctcccgccgctcaatctgatacttcaaaagaccagactcaacagaaaaaagaaaagacgcaaaaagagaaaacacctaaatcaatcgatcacaataaacagatcagcaattacttgcaacagatcgggttcagcggcacggcaatgatcgtaaaagatggaaaagttgtgctgaaaaaaggctttggctatgcggaccgaaaacaaaaaattaaaaacaatccggagacatcatattatatcggttcttcacaaaaagcgttaatcgcgacggctgtcctgcagcttgaagaaaaagggctgctgcagacgagtgaccccgtcagtacatacttgccgaattttcctaacggcacgcgcattacattgaaaaacctgctcaatcatacgtccggcataaacgggcatattgagggacagggaccgatttctccaattgatttaatcaaggatatagaataccgcggaattaaacggcagcccggggtttgggattacagggattccaactattcagtgcttgcttatatcgtatctcaagtcagcggggagtcttatgaacaatatataaaagaacacgtgttcaaaccggccggaatgaagcatgccggattttacaaaacatttgccaaagccaaatatcctgccgtcggctacaaagtcgatgagagcggcagtcttgtaacgccgcaccttttggacttatcgcagctgtacggggcgggcgacatgtatatgagcgctgaagatctctataaatttgataaagcgatcgtaaacggcacgctcctttcaaaagaaagcttcacaaaaatgtttacagcaggaagcagtgccgcttacggcatggggttttacattgatccgggaagctattccaatcacggtgttatgcccggttacaacattttgaacagcttcagccattcggcaagcaaatatgtcatattactgtcaaacattcagaataacgccaaattaggacaggtaaacaatagaatttaccaattgcttaaccagccggactaacagagccgtcattcacgaaaagcggatctaggtatggtatgatatatacatgggcgaagatccgagctgaaggcgaatcgttaagctggcaagcttgacaagtatttccgacacaattacaatgaagttgtaacatttgtttttttaacatgattgttaaaccatttaaacttgacaagggcatgagagactcattccctgtgaaggttctgtatgttgagaaaatcagacaatgtacatgccggcacttatttaagcaaaaaccaagttcatagcaagaggaggtgaaagtatgaccccaatgacggttctcatctccattttgctgactctgctcggtttagttgttggctactatgttcgtaaaaccattgccgaagcaaagattgcgggcgcacgcggtgctgccgagcaaatccttgaagatgcaaagcgtgatgctgaagcactgaaaaaagaagctctgcttgaagcaaaggacgaaatccatacacttcgaatagatgctgaacaggaagttcgtgaaagacgaaatgagcttcaaaaacaagaaaaccgtttacttcaaaaagaagaaaatcttgaccgtaaacatgaaggaattgataaacgggaagcgatgttggagaagaaagatcattctctgaatgaacgacaacaacatattgaagagatggaaagcaaagtggatgagatgattcgtatgcagcagtcagaactcgaacgcatttcgagcctgacacgggatgaagcgaaacaaatcattcttgaccgggttgaaaatgagctttcacatgacatcgccatcatgacaaaagaaaccgaaaaccgtgcgaaagaagaggcagataaaaaggcgaaaaacattctgtcgcttgctttgcagcgctgtgcagcagatcatgttgccgaaacgacggtatcggtcgtcaatcttccgaatgatgagatgaaaggacgtatcatcggccgtgaagggcgtaacattcgtacgcttgaaacgcttacaggtattgacctgattattgatgacacacctgaagcagtcattctttccggatttgatccgatcagacgggagacggcaagaatcgctcttgataaactcgttcaggatggccgtattcacccggcgcgcattgaagaaatggttgaaaaatcccgccgtgaggtagatgactatatccgggaaatgggtgagcagacgacgtttgaagtcggcgttcacggcctccacccggatctgatcaagatcctcggccggttgaaattccgtacaagctacgggcagaacgtactgaaacattctatggaagttgcgtttttagcaggtttaatggcttccgagcttggagaagatgcaaagcttgccaagcgggccggtcttctgcatgacatcggaaaagcaattgaccatgaagtggaaggaagccacgtggaaatcggagtggagcttgcgaccaaatataaagagcatccagtcgtcattaacagtattgcgtcacaccacggagacgaagagccgacttccattatcgccgttctggttgctgccgctgatgcactgtcagccgcaagaccgggtgcgagaagtgaaacgctcgaaaactatatccgcagacttgaaaagcttgaagaaatctccgagtcttacgaaggtgttgaaaaatcatttgcgattcaggccggccgtgaagttcgcatcatggtgaagccggactccattaatgatttagaagcccatcgtttggcacgtgatatccgtaaacgaattgaggacgagcttgattatccgggccacattaaagtgaccgtaatcagagaaactcgagccgtagagtatgcaaaataaagtgatgcttagcgcatcactttatttttttgagtccctgaaaaggaaggaatggaatgtatgagaattttatttatcggagatgttgtcggttccccgggccgcgacatggtaaaagaatatgtcccgaaactgaaagcgaaacataaaccgcattttacaattattaacggagaaaatgcagcacatggaaaaggactgacagaaaagatctaccacagcctgatggaagcgggagcagatgccattacaatgggaaaccatacgtgggataaaagagagatcttcgactttattgatgatgtgccgcatcttgtccggccggcgaatttcccggaaggtacgccgggcaaaggcattacttatattaaatcgaacggaaaagagcttgccgtcattaatttacaggggcggacgtttcttccgccgcttgatgatccgtttgctaaagcggatgaattaatagaagaagcgaaaaagcgcacgccgtacatttttattgattttcacgccgaagcgacaagcgaaaaaattgcgatcggctggtacacagacggaagagcctctgccgtggtaggcacccatacacacgtgcaaacggcagataaccgcattttgccgaaaggaacggcatatattactgatgtaggcatgacgggtccgtacgacggaattctcggtatggacagagaaacggtcatcaagcggtttaaaaccaatcttcccgtccggtttacggtggcggaaggtaaaactacactgagcggagtgctcattgacatcgacgatcaaacgaaaaaggccgtaaatatcgaacggatattaatcaatgatgaccatatgttctttgaataggtgatcatgtgtttattttataaaaatattaaaaggaaaagcaggaatatagcaacttcttagtgaatatagtagaaatggaaggtagcccgctatttttgaaaagcattgtggggatggctttttggatagcaacatctaataatgattgttctaatgaacactcacttatccattgtaaaactaagggggagcagaaatggaaatcttaaaagtttcagcaaaatcaagtccaaattcagtagcaggcgcgcttgccggtgtattgagggaacgcggagccgccgaaattcaagcaattggggcgggtgccttaaaccaggctgttaaagcggttgcgattgccagaggctttgtcgcgccaagcggcgtagatttgatttgtattccggcttttacagatatacagattgacggagaagaaagaacggcgattaagttaatcgtcgaaccccgttaaaaacaaaaacatgatattctcaacctgcttgcgtaaggcgagcgggttgtttttattgttgtcatattttctcacaatattatattgatagtacgaagagatgataaatggctttattcatataatattcaaaaaaaatcccgcccatttttccggacggaagcagttgttttcttggagtggacactggtatttacctcctttttatatcatgttacaatccagttattacagtgttttttcgaggaggagtgtacgtgttgggaggaaagatgaaagctatcgtcaaaaatgaaaacgctttcggagcaaatctgaaagaaattcccataccttccattaatgagaatgaagttctcattaaagtacaggccgcatctatatgcggtacagatgtgcatatttataattgggatcaatgggcgcagaaacgaatcaaaacacctcaagtattcggacatgaattcagcggtatcgtagcggaaacgggcaagcacgtcacaaatgtcaaaataggtgactacgtttcggctgaaacccacttcgtctgcggtacttgtgtcccttgtttaacaggaaaacatcatgtgtgcacccatacaaagatcctcggcgtagatacagccggttccttcgctgaatatgtcaaagtgccggctcgaaatgtttggaaaaatcccgctgatatggaccccgccgtcgcttctgttcaagagccgcttggcaacgcggtgcatacggtgctggaaagcagccagcttgcgggcggttccgctgcaattatcggctgcggaccgatcgggctgatggcggtggcagtggctaaagcggccggtgcatcctgtattgcggccattgataaaaatgattacaggctggctcttgcgaagaaattgggagccacgatcaccatttcagctgataaggaagatccgcttgaggtgatcgacaccttaacaggcggagaagggatcgaccttgtctgcgaaatgtcaggccacccggcagctatagcacaaggattaaagatggcggccaacgggggaaggttccatatgctgagtctgccggaacttccggtgacggttgacctgacaaatgacgtggtgtttaaaggacttaccgtccaaggcatcacaggcagaaaaatgtttgaaacatggcggcaggtatcgcacctgcttgaatccggccttgttgatctgacgccggtgatcacgcatcagtttccgcttgaagactttgaaaaagggtttgacctgatgagaaagggccagtgcggcaaagtcattttgattccataaggggagggttctataatgaaagaatttgaatttctaaaagccgagcttgataaaatgaaagaaaataaaacgtggcagcaaatgaaacaaattgaaacgaagcagggtccgtcggtggaagtcaaagggcaaaacgtgatacagctttcatcgaacaattatctcggtttgacgtcgcatccaaggcttgtcgaagcggccaaacgcgccgcggaagaattcggagcgggtacggggtccgtccggacaatcgccggaacattcacaatgcacaatgagctggagaaaaaattggcaaactttaaaaaaacagaagcggcacttgtttttcaatcggggttcacaacgaatcagggtgtcctatcaagcattcttacaaaagaggatatcgtgatctctgacgaactgaaccatgcttccatcattgacgggatcaggctgacgaaagcagataaaaaggtgtaccgccatgttgatatggacgatttggaaagggtgctgaaaaaatcaatgaattaccgcatgcgcctgatcgtcaccgacggcgtattctcaatggacggcaacatcgctcctttgcctgacatcgtcaaacttgcagaggcgtacgatgcctttgtgatggtcgacgacgcgcatgcttccggcgtactcggaaaaaacggaaggggaacggttaatcacttcgggcttgacggaagagtccacatacaggtgggcacattaagcaaagccatcggagtgcttggcggttacgccgcagggtcgcaggttctgatcgattacctgcgccataaagggcgtcctttcttattcagcacttctcatccgcctgcggtaacggccgcatgcatagaagccattgacgtcctgctggaagagcctgagcatatggaaaagctatgggagaacacggcgtatttcaaagacagactggttcaaatggggctgaccctcacaaaaagcgaaacaccgatcgtgccgatattaataggggaggaagaaaaagcccaggcattatcagaccttttattgacccgcggcgtgtttgcacaaagcatcgtgtatccgacggtcgcccaaggaaaagcgagaatccgcaccattattacggcggagcatacaaaagaggagcttgaccgggccctggaagtaatccgttcagccgcaaaagagcttcagcttgtgtaagggggaaatgattccctcttttttatttcttattgattcttattctcaataaggtgtacaataataggctggcggttgtgccaaacgcttttaaccagtatacttgagggtggaagtttcggttgaaaggagacattcgaacatgaatgaaaagcaaaagcaggaaagcggacaagtgaatccggcggacaaaacatccgaaaaggattacagcaagtattttgaagccgtatatattccgccttctttaaaagatgcgaaaaaacggggcaaagaatccgttcaatatcataacgattttaaaatctcagaagaatttaaaggcctcggtgaaggcaggaaattttatatccgcacgtacggatgccaaatgaacgagcatgatacggaagtcatggcgggtatttttatggcgctcggttatgaagcgacaaattcggttgatgacgcgaacgttattttattaaacacttgcgctatccgggaaaatgctgaaaacaaagtgttcggagagctcggccatttaaaggcgctcaaaaaaaataacccggacctgattctcggcgtctgcggctgcatgtcacaggaagaatcagtcgtaaaccgcatccttaagaagcacccgtttgtcgatatgattttcggcacgcacaacattcaccgtctgccggaactgttatcagaggcatatttatcaaaagagatggtcattgaagtgtggtcgaaggaaggggatgtcattgaaaaccttccgaaagtccgcaacgggaaaattaaaggctgggtcaacattatgtacggctgtgacaagttctgcacatactgcatcgtaccgtatacccgcggaaaagaacgaagccgccgtcctgaggaaattatccaggaagtcagaagacttgcaagcgaaggttataaagaaatcacactgctcggtcaaaacgtgaatgcgtacggaaaagattttgaggatatgacgtacggactcggtgatttaatggacgaactgcgtaaaattgatattccgagaatccgattcacgacgagtcatccgcgtgactttgatgatcatctgatcgaagtgctcgccaaaggcggcaaccttcttgaccatatccatcttccggttcaatcaggaagctcagcgatgttaaaaatgatggcgcgcaaatatgacagagaacgctatctggagcttgtcggaaaaattaaagcagcgatgccgaacgcttcactgacgaccgatattattgtcggttttccgaatgaaaccgatgaacaatttgaagaaacgctttcgttatatcgcgaagtggaatttgacagcgcatatacgtttatttactctcctcgtgaaggcacgccggcagcgaagatgaaagacaatgttccgatgagggtcaagaaagaacgtcttcagcgcctcaatgatttggtgaaagaaatttcagccaaaaaaatgaaggaatatgaaggcaggactgtcgaagtattagttgagggagaaagcaaaaataaccctgacattcttgccggctatacggaaaaaagcaagctcgtcaacttcaaagggccgaaagacgccatcggcaagattgtacgcgtcaaaatcgaacaggcgaaaacatggtcgcttgacggtgtgatggcaggagaagcaatcgaggtgaaataataatgacgctttactcaaagaaagacattgtacagcaggctaggaaccttgcgaaaatgatttctgaaacagaagaagttgattttttcaaacgcgccgaggcgcagattaacgaaaatgaaaaagtctctgcgattattaatcagattaaaaccctgcaaaagcaagccgttaacctgaagcactacgaaaagcttgaagcgctgaaacaagtggaaagtaaaattgacgccctgcaggaagagcttgaagggattccgatcattcaggaattcagagattcccagattgaggtcaatgaccttcttcagcttgtcgcacatacgatctcaaatcaggtgacaaacgaaatcattacatctaccggaggcaacctgctgacgggagaaaccggttcaaaagtaaaacattcgaataacagctgttctatttaaacacggggccttcatcggcccgtgtttttttgctttttgagaactaattgtaatatgtactaaattttcattgactcaccgttttgtcccattttactggaaagttttatcatacttaaaagtaaagtttctgggcagggctgcatacaatgaaacagaaactttgtatttttatatttttattataaaaatgcacatgagacaaatgcccagcataagataacacgaagaagaacaaggaggcctgccggaatgtctgaatacagggaaattattacgaaagcggtagttgcgaaaggaagaaaattcacccaatgcaccaacacgatctcacctggagaaaaaccgtcaagtatattgggcggctggattatcaaccacaagtacgatgccgaaaagatcgggaagactgtagaaattgaagggtattatgatataaacgtctggtactcttacgccgataatacaaaaacggaagttgtaaccgagagagtaaagtatgtcgatgtgattaaactcagatacagagacacaaattacttagatgacgaacacgaagtcattgccaaagtgctgcagcagccgaattgtcttgaagtcaccatttctcctaacggaaataaaatcgtggttcaggcagagagagaatttttagcagaagtggtcggtgaaacgaaagtcgtcgtcgaagtaaatcctgactgggaagaagacgatgatgatgattgggaagacgatcttgatgaagaattagaggacattaaccctgaatttttagtcggagatcctgaagaataagttgaggctaggggagtttaacaccccaagtctcttttttatatataaagatatcactcttttgtttatgttataatgggattcggataagagaagatacatagtgagggattaaatgatggctagttacacgcctatgatacagcaatacttgaagataaaggcagagcaccaagatgcctttttattttttcggcttggtgacttttatgaaatgttttttgaagatgcaaaaaaagcgtcacaagagcttgaaattacactgacaagcagagacggaggttcggctgataaaattccgatgtgcggcgtgccgtatcattccgcggcggcttatattgaacagctgattaaaaagggctataaagtggcgatctgtgagcagacggaagatccgaaggcggctaaaggcgttgtaaaaagagaagtcgtccagctgatcacaccgggaaccgtgatggatggaaaaggcatccacgagtcggaaaacaactttatcgcttccgtttccgaattccgtgacggatacggtctcgctttatcggacttaacgactggagaaaacctggccgtatttattgagcggattgaagatgtcatgtcagaaatttactcagtcggcgcaaaggaaattgtcgtatcgagcaagtttaacgaacatacagctgctcagctgaaagaacggtgcggcgccacgatttccatcgaagacggggaaataacagaacgcattgaaatcgcaaagcacttgccgggcgaagagctgacagagacgtttatgcgtttatatacgtatttgcagaaaacgcaaaaacggagcctggatcacctgcagccggttcaagtatatgaattggaagaagcgatgaaaattgacctgtattcaaaacggaatcttgagctgacggaaacgatccgttcgaaaagcaaaaaagggtcattgctttggcttttagacgagacgaaaacagcgatgggcggccggcttctcaaacaatggattgaccgcccgctgatcagggcatcccaaatcgaagaacgccaggaaatggtcgagacgctgatcaatcatctgtttgagcgtgaagatctgcgagagcgcctgaaggaagtatacgatttagaacgtctggcgggccgggtcgcattcggaaacgtcaacgcaagggatttaatccagctgaaagaatctttaaaacaagtgccgagcatcaaagagcttgtagggtctcttaaccataaaaaagcaaaagaacgcgccggcttgattgatccgtgcggagatttgcttgacctgttagaagatgcccttcatgaaaacccgccgttatcgttaaaagaaggcaatttaattaaagacggctatcatcagaagctcgatgagtaccgtgacgccagcaaaaacggtaaagactggattgccagactggagcagcaggaacgcgcttatacgggcatccgttcattaaaggtcggtttcaataaagtgttcggctattatattgaagtcacaaaagcaaaccttcatctgcttgaagacggacggtatgagcggaaacagaccctcacaaacgccgaacggtacattacgccggaattgaaggaaaaagaagcgcttattttagaagcggaaaacaacatctgcgagctggaatatgagctttttgccggactgcgtgaaaaggtgaaacaatttattccgcgcttgcagcgtcttgccaaacaaatgagtgagctggacgcactgcaatgctttgctacgatcagtgaaaacaggcattacacaaagcccgtcttttctgataatgaagtaaaagtcattgaagggagacaccccgtcgttgaaaaggtgatggacagtcaagaatacgtcccgaacaactgcctgatgggcgattcgcgggaaatgcttctgattacgggtccgaatatgtcaggtaaaagcacgtacatgagacagatcgcacttctatcgatcatggcccagatcggctgttttgtgcccgcgaaagaagcggttctgccgatttttgatcaaatcttcacgagaatcggggcagcggatgatttgatttccggacaaagcacctttatggtggaaatgctggaagcgaaaaacgcgattgtgaacgccacaaaagacagcctgatcctgtttgatgaaatcggccgcgggacatcaacgtacgacggaatggcgctggcacaggcgattattgaatatgtccatgatcatatcggcgctaaaacactgttcagcacgcattatcatgagctgacggtgcttgaagataagcttcctcagctgaaaaacgttcatgtgcgcgcagaggaatataacggaacggtcgtgtttctccatcaaatcaaagaaggagccgcagataaaagttacggcattcatgtcgcccagcttgccgagctcccggacgatctgatcagccgcgcgcaggagattttgaaacagcttgagcagacgggagataaaccggagcttccggcggtatctgagaaaaagtccgccgtcagagaagaaccggcacagctgtccttttttgctgacggtgaaaaagaacagaaggcaccggctgtttctaataaagaaaaacaagtgcttgaagcttttaagtcaatcaatattctcgatatgacgccgcttgaggcgatgaatgaaatgtacaagctgcaaaaaaaattaaaatagaaagaggtgacggacttggcaaaagtcatccagctgtcagatgaactctcgaataaaatagcggccggcgaggtggtcgaacggcctgcctcagtcgttaaagaattggtggaaaacgccatcgacgcaaacagcacagtcattgaaatcgacatagaggaagcggggctttcgtcgattcgggtgctcgataacggcgaagggatggaaaccgatgattgcaagcgggctttccgccgccacgcgaccagtaaaatcaaagatgaaaacgacctgttccgggtgagaacactcggtttccgcggagaagctttgccaagtatcgcgtctgtttctcatctggaaatcaaaacgagcatcggcgagggagcgggaacccatctcattcttcagggcgggaatatcatttctgagcagaaatcctccagcagaaaaggaacggagattatcgttaccaacctgtttttcaatacacccgccagattgaaatatatgaaaaccgtgcatacggagctcggcaatattacggatgttgtcaaccggatcgctcttgcgcatccggaagtatcgatccgtctccgccatcaggggaaaaatctgctgcagacaaacggtaacggggacgtgcgccatgtgctggccgcaatttacgggacggcggttgcgaaaaaaatgataccgctccatgtcagctcgcttgattttgaagtcaagggctacattgcgcttccggaaatcacgcgtgcatccagaaactacatgtcatctgtcattaacggaagatacattaagaatttcccgcttgtaaaagcggtgcatgagggctatcacacactactgccgatcggccgccatccgattacgtttatcgaaattacgatggacccgattttggtcgatgtcaatgtccatccctcgaagcttgaagtccgcctcagcaaagagacggagctgcatgagctgatccgtgacgggataaaggaagtgtttcaaaagcagcggctgattccgagcgcccagctcccgaaaaaatccgcgccggcaccggccaaaaacgaacagcaatttatgacattcgaggaaagcgcgcctgagcggaaacttcctgaaaaaacgccggagccgtcttactcaccgatgaagctgagttcggtcgtaaaagagcctgagccggtaatagaagaagagtccctgccggatgaagcgggtcacggagtgccgccgaagatcggcatgccggtaacggaagcgcatgtttccgatattccggagcctgaagaggaggctgactctgaagaaatacgggaagaaagagttccggtgatgtatccgatcggccaaatgcacgggacatatattttagcccaaaacgaaaacggcttgtatatcattgaccagcatgctgcacaagaacggattaaatacgaatatttccgggagaaagtcgggcaggtcgagcctgaagtgcaggatatgatcgtgccgctcacctttcattatgcggcaaatgaggcgctgatcattgaccagcatcagcatgagcttgaaagcgtcggagtatttttagaagcattcggcacgaacagctacatcgtccgctgccatccggcctggtttccaaaaggggaagaagctgaactgattgaagaaatcattcagcaggtgcttgacgccaaacagatcgatattaaaaaactgcgggaggaagcggccattatgatgagctgcaaaggctcaatcaaagcgaaccgccatttgcgaaacgacgaaatcaaagcgctcttggatgacctgcgccgaacgacagacccgttcacatgcccgcacggccggccgatcataattcatcacagcacgtatgagatggagaagatgtttaagcgtgtgatgtagaaggattctgtgagggatttatctctcgtgcccacattttgcccactgattttagctgtttaggtattcatcaaaccgattaatgcttttttgattgtgattctgcaagatatggatatagacatcagctgtcattttcacatccgtatgaccgagtctctcacttgcaaatttgatatctgcaccactttctagcagcataatggtgtgtgtgtgtctcaaaccatgtggagtaatgtggtgcagatcagttttctttagcaaggaatctatgactttatcaattccaaacggtccaaggtcatctcccttatggttggtaataaaaaagggagactggttataattatcaccgtgttttattttattttcttcttgccattctttaaactttttcatctctttaattaaagtgtcatcgatgcttatagttctaacacttttacgggttttaggtgctatgattccaaactcgttcttagatttagcaatccttaaagtcaatatcggaccaatataaagcaatgagttcaccttttcttaagccggtccttaaaagagttaaagcgatcatgtaatgatgatatttagaagattttgctgcctccataaagacagatacttgttccttgtccaggtaattgtctttaagcattctataatccgaatctttttttatagaaatgttttgatattatcaggaattgtcttaaccatcttactaaagccgcaagctgatgagcggactgaataacttcaaatacagattcacagcagaccgcaatcatattgcggtttttccatttgtgcaaattacggggatagtagtaaaatcaaataaaagaaaaacaggggaggactaaaaaacttaatcgtgtagctttaaaataaagattgattatgtaaaacaaagtccgataatttataaaaaagtttgatagaatgacattaacaatacagatttttagaattcaacaaacggtccatttaatggcacaattaatttgtgatgcaagttaaaatttgttatcatcaataacaatagaattaaactaaagattatttaaacagcatagaaaggggggaatgctttgaatataaatttaatattatttgtctcatcaattaatcaagaacctacagaggaaaatactcaaacattagtgaaaacatttgaatctgactttcgccctcaagtaggagatataattgacgatcctggatttgattcaggtttccataatggatacgaggtggtaaaagttacaataaattatacttcaaatgagtgccttgtttcactgacgccgttagcaattgaagttgaaaaaattagtgttgaagattatataaaaaagcttaaaacacatgggtggagtattcagtctaggtagcactcagcagtttttattataaggtactattcctcagactgcgcgtttgttgaagattctagacataaaatgatcaaacttttttataaaacgatgattgaaatgaatatagaaaaaacgtgttttgatcaatctttttttcaaaacacgttttttctatttgtacttttatcaaggtttattaagttcatttaatcaaactttattttaaggctacaaatcgctttctccccgcttaaattaaaagcccaactttttagagtttgggcttttttagatgatgcaattttgtattttgtcttacggaacctctccttgtcgcatgagactttttacaactgcacgtaaatctatttcgctttttcctgtttttctctttaactggccttttacatcggtagctcatgttaagtataatacggtatatttcctttctgagtcagcatatctttcattcccttaaattaaaaagttaagactatttcttagatatataaacatccgctatatttataataggggttcgcttaaatttaattttgtaaccattctcgtccactcatcatcatatttattatcatcaaaaaaggaggctgctctctttatgtctaaccatgctaatttaataaaaatatttacccagaaaactattagaagctctgaaatatcaatgttttgagtaatcatggtttattgtcaaaaaactaaaaataacagtacgtatgagatggagaagatgtttaagcgtgtgatgcaagaacaatgatttatgtgagactaaaccgttatttgcccacaagtagccttactagtttgaatgacccagcctgtcagagataacttttgagttttttaatttctggtataattgttgcatctgtatgccgtaaatcatgaaaataatttgtttaacatccagctgcttttctttcatataaaaattgtttatggatagtatttggggtgacagcgcagcatcttgtgtttggtgtaaccgtctatatgtcactgcattaatagtgaaataatggagaaagcgattccttaaaatcttaaagttatctgtgaagaaccaggtgactaccctgagttatatagatgggtacctgcttttccaaattcacagggaggagatggagggggaatttaaataaaattggaatttggcaggttatactatccgcaagttagtcaagggggactagtaattagcccccccttacatttagttcttcctgcggttttttctatttttgatcaaactgaaaaccactaagagaaccacaccgatagcaacgatataaaatgaaatttctgctgctgcggtattaatattcttaagaacaaggataagtcctattaaaactataggaatgatgaaagttagaatttttatagcttttgggctcggttcagcattacttttatgttccatagttacctccgatcttagcactttagaaaataatcactttaaagcttaacacaggataaatttgttaaacaccaacaatagccccgtttaaatgaaaagcctaagagttttagtaatccgccaagcggctgttgggttgccagttcttttagagcacccgcatagcacgcatcttcaactgcaccagtaaaattgtcgatcgtattaagaattatttcaaaacgccgattccgcccatagcagctttaactttagcaggtattgcatcccaatctgctcttagtgcttttgcatcccagggcaatttaccttgagcagtaaactccgacccatataacatagtctatttgtctaatgattaatatttactttttacacttaatgattttatgttagttttggttttgcacagtaaaaagctgcgcgacgctttcgtgaattgttgcagctagggctgatttgaaaagagtgtaaattccgccgtacttttctaagttcaattatgttaatgtcaacataacgttgaattcggtgtaagaactaaggtattctgatatatttcgagagcccgtatgatttagtttatcttgaagaaaaggattgaaataataatcttgattgcggatcatttctaaaaactgattatccccttcgaccgcttcggcaattgcttttcaaaacaaaagctcaatttgttttctttttatccgaaactcatattcatccttcattttctgaataaaattccctaaagaattcatctaaattaatattctgatttccttatatatcagcatagcaaattgtaaaaaaggtccagactggtgcttttggcgggagcagaaagtttttttaactttaccggaaaatccatggaaaaacgtggtgtcatctggtaaagtggttacagtcggctgggcggcggcagcagtctgcccggatcttttaaatgggaatggtgacaatggatcatacatatgaagtgcatcaaatcaaaacttatcaccagatgtggtccaactattgttatattatcgcagaccgatcaaaaaaatctgcgatagcggtggacccgtcctgggaaatcgataaaataaccgataaactgcatgaattggatgttgatttatccgctattttattaacacattcgcattatgaccatgtaaacttggcggagccgcttcagcaaatctatcattctgatatatacatgtcgtcggcggaaatcgatttctatcaattccggtgcagaaacttaatagcgcttgaagacggccaaacctttgcggccggagggtttatcatcagaagtatactgaccccgggacatacggccgggggaatgtgctatttgctatctgatcatctttttaccggtgacaccgtgtttacagaagggtgcggtatatgtgaggacaggggcagctcagctgaagatatgtttcacagtatacagaggatcaaagcctccattccgccgcatgtgcgtgtgtatccggggcactccttcggggagaagccgggtcaaaaaatggagagtcttttgaaaaacaatatttactttcagattgaaaaaaaagaacattttgtgaatttccgcaacagaaaaaatcaaaaagggctgtttcattttaagtaatgtgtaatttagttctatctaactagcttttcttttgaggcaaggaacttctgaaatggaatggaagttattactagatttctggtgatgaatggctgagtaacgggagtttgcggaagagaacgccgggcaggccggatgggacattctgcttacgcctgttccgaaagccctgagtccgcctttcgacagggaaaaataggcattattcaggagttcacataggataaattaacttgacatggtatttttgtgaagttactatcaacttgaacatgcttcttatctgaatccgagaaaggatggctgagaaaatgatcacatacttattccccggacaaggttctcaaaagcagggaatggggagctcattgtttgatgaatttaaagacttaacggagcaggctgatgaaacactcggatattccatgaaacggctttgtcttgagaatccgtattccaaccttcacaagacgcagttcacccagcctgctttatatgttgtaaacgcgttaagctatttgaaaaaaatccaagacaatgacataaagccggattatgtggccggccacagtttgggagaatataatgcgctgtttgcagcaggtgcttttgattttattaccggcctgcagcttgtccgtaaaagaggcgaattaatgagtatggccactgacggaaaaatggccgctgttatggggttaactgcagctcaagtgtcagacgcccttcaaacgcacggattacatacgattgatattgccaatatgaattctcctcaccaagttgtcatatccggacgcaaagaagacattgaaagagccaaaagcgtattcgaaggattaaaagacgttacgatgtttcatccgttaaacgtaagcggcgcttttcactcgaggtatatgagtgaagcaaaacaagagttcgaaaaatttttacagtcatttcatttttctgctatatcaattcctgtcatttctaatgtgcatgccagaccttatgagcaagacggaatccactccgttctggccgatcagatcgaccattcagtgcgatggaacgacagcatccgctatctgctggacaaagggcggatggaatttgaagaagtcggcccaggccatgtgctgacaggacttattcaccgcatcaaaaaagaaactgaagcttcacccgccatgtagcggaacgcaagtcaaaattcttatctcacacaatagtgccagccatacaacatcacgaccacttcacttgcacacgacatcacgaaaaactcacaaatcaatattttgaaaaaataaagagcaaaaaggagaacaaatgaaccagccaattgttttcatgttttctggacagggttcccaatactatcaaatggggaaagagctgtttgcacataacgccgcttttcggcagaaaatgcttgacttggacgattttgcagtcagccgtttcggttactctgtccttaaagagatgtatcatacaggcaatcgtctgtctgatccatttgaccgccttcttttcagccatcctgccatttttatggctgagtacgcacttgcatatgctttggagcaaagaggcatacgtcccgattatgtgatcggagcaagcctcggagagtatgcagcggccgctgtgtcgggcgtgctgagcgccgaggatgctttagattgcgtgctggaacaggcccgaatcgttacggaaacttgccgtaacggcagcatgcttgcgatactgggtgatccggctttatatcaagatgatccgctgctcggcgaacatagtgaattggcatctgtaaactatcattctcactttgtcatctcgggagagcgggaacatatcaaaaagatcatggacgatctgagagaaaagcagattcctcatcagctattgccggtatcttacgggtttcactcagcgctggttgatcaggcggaacagccgtacaagcgctttttagctcagaaatcaatccggactccgtttatacagtacatctccagtgcgaccggagaggctgagaccgatatacaagcggactttttctgggatatcgtaagaaagccgattcgattccgcgaagcgcttcaattcgcagacagccgccaaaaaggattgtatattgatgccgggccttccggaacattggccgcatttgccaaacagattcttcctgcaggatcggctgaacgcatccgtgccattatgacgccgtttcataaagaacaaacacatttgcagcaaatagaagacagcattttatcaccgcccggaaggagactgtaagatgatcagctttgtttttccaggccaaggctcgcaaagaatagggatgggggaggacctgttcggccgctatcctgaattaaccgcaaaggccgatcacattctcggatattccattcaggagctgtgccgggacggagaacgtctcaatcagactcaattcactcagccggcgctctatgtcgtcaatgccctcagttatttgaaaaaaacagaagaaaccggcttgaaaccggattttaccgccggacacagtttgggcgaatataacgcgttatacgcttcgggcgcctttgattttgaagaaggcttacagttggtcaaaaaaaggggcgaactgatgagccgcgcaaaaggaggcggcatggcagcggtgatcggcctgactcatgagcaggtgacggatgttttaagagaaaatcacttggatatgattgatatcgccaacatgaacacaccgcagcaaattgtcatttccggatataaagaagatattgaaaaagcagcatccgtttttgaagccgtaaacggcgtaaaaatggttcaccgcttaaatgtcagcggcgcctttcactccagatacatgctggaagcgaaggaagagttttcacggtttattgaatctttccattttaagccgctttccatcccggtcatttcaaatgtgacggcaagaccctatgagcaaagagagctgaaagagacactcaccggacaaataacgggatcggtgaactggacagacagcatccgtttcttaatgggaagaaagaacatgagctttgaggaaatcggtcccggaaaagtgctgacggggctgatacaaagaattacggctgaagcggagccgataacagatgaaatcaaagtcccggctgagtctggaaaaagctcaattacggcggcgtctttaggaaatgaagagtttaagcgcgattatcaattgaaatacgcctacttggccggcggcatgtaccgcggaatttcttcgaaagaaatggttgtcaaactggctgaaaaaggaatgatgggctttttcggaacgggcggtttgaacatcgcgcacgttgaggacgtcattttgtcaattcagcatgagcttcgtgacggcggttccttcggcataaatgttgtacataacatgaagcatacagattcagaagaaaaaatgattgatcttttactgaagcatggggttcagaacttggaagcatcagcgtttttaacggttactcccgctttagtaaggtttcgcgctaaggggttaaaacgcggtgccggcggacaaataatagcgcgtcagcggattatcgccaagctgtcccgtccggaagtagcggaagcgtttctcagcccggcgcctgatcacattctgcagaaacttgcagccgaaaacaaaattaccgctgaagaagcaagtctgatgagagaaatacccgttgcgcatgacatctgcgtagaggctgattcaggcggccacactgacggcggagttgcttacagtctcatgccggcgatcatccgtttacgagatgacatgatgaaaaaataccgatacggcaaaaccgtccgcatcggagccgcagggggaatcggaacgcccgaggctgccatggccgcatttatgctcggcgctgattttattgtgaccggatctattaaccaatgcaccgttgaggcagcgacgagcagcctcgtaaaggacctcctgcagcagatgaatgtacaggacacggcctacgcgccggccggcgatatgtttgaatcaggcagcaaggtgcaggtattaaagaaagggctgttctttccgacccgcgcctctaagctgcatgaactgtatcagcgtcaccgctcaattgaagaaattgatgaaaagacactcagacaaatagaagagaagtattttaaggcaagtgtaagcagtatttatgacaaagtgaaggctcattattcgaatgaagacatttcaaaagccgaacggaatccgaaacagaaaatggcgctcatattcaaatggtatttcaggcaaagttctgcttcggcgattaaaggtgacccggatgccaaggtagacttccagattcattgcggcccggcattaggcgcctttaatcaatgggtgaaaggtacggagctggagtcctggaaaaaccgccatgccgatggtatcggcctgcggcttatggaagagacggccacgcttttgaatcagaagttaggttcatttttgcaaacgtgttgacaagacgaaatgatagattgaaaacatggaatattcataaaagatgaaacagggaggaactgacaatgagtaaagaaaaaatctttgaattgctgcagaacacaatctacgaggttttgcctgatttagaaggcgaacagctttcacaggaagaccagttagttgatctgggggcggattcagtggaccgcgccgaaattatcacgatgatgcttgaagaattatcactgcagatcccccgtgttgagctgacgggagtgtcaaacatcggcgaattggcggcaaagctttatgaaaaggtacaggctgtctgataaaacggtgaaataatcggaaactcaaaattcatattggaggcgaagttcatggcggctgccggaatagaagcgataaatgtgtttggcgggacagcataccttgatgtcatgcagctggcggagtacagaaacttagaccctgccagatttgagaatttactgatgaaagaaaaagcggtggcgcttccgtacgaagaccccgttacattcggcgttaacgcggcaaagccgattatcgaccgattgacagaggctgaaaaagacagaatcgagctgctgattacctgctcggagtccggcatcgacttcggaaaatcactcagtacatatattcatgattacttagacctcaaccggaactgccgtttatttgaactgaaacaagcctgttattcaggaacggcgggtttgcagatggcgcttaactttattttgtcgcagacatcccccggagcgaaggcgcttgtcgtcgcgacggatatttcccggtttttaattgccgaaggcggtgatgcgttaagcgaggattggtcttacgcagaaccgagcgccggagcgggtgccgtcgccttattgatcggtgaaaatccaatcgtatttcaggcggatgcgggcgctaacggctactacggctatgaggtgatggatacatgccgtccgatcccggacagtgaagccggtgacgccgatttgtcattgatgtcttacctcgattgctgtgaacagacatttcgcgagtacaaaaaccgtgtgccgggcgctgactacaaagagacgtttcactatcttgccttccatacaccgtttggcggcatggtcaaaggggcccaccggacgatgatgcgcaagcttgcaaaagcgaaaaacgctgaaatcgaacaggattttcaaaccagagtagagccggggctccgctactgccaaagagtcggaaacattatgggagcagcctctttactggctcttgcaagcacgattgaccaaggggcattcgacacttctaagcggatcggctgtttttcgtacggctccgggtgctgttcagaattttacagcggcgttgtgacgcctgaaggacaaacgcggcagcattctttcaaaatagaagagcatctgaacaacagatacaggctgtccatggaagagtatgaagaactgtttaaaggcagcggtctggtgaagttcggaacccggaatgtcaaattggatatgaatatgattccgaacattttggaccatcatgccgggagccctcgtttatatttggaagaaatcacggaatttcatcggaaatacaggtggatatcgtgacctatgaaacgataaacgtccgttttcagcaaaatgtctgcttcatcacctttgatcggcctgaagccaacaatacgattaatgagcgtttagtggaggaatgcctgcatgttctttctgaatgtgaagactccgtgacctccgtagtgcttgaagggcagccggaggtattttgtttcggggcggattttgatgagatgtaccggaaaatgaggcagggaatgcagcatgcggaatcgcaggagccgctttaccgtttgtggctggcattaaaatccgggccgtacattacaatcgcccgcgtccgcggaaaagtaaatgcgggaggtgtcggttttgctgccgcgtgcgatatcgtcattgcagaggagagtgcttcgttcagtttatctgaactgttattcggactttatccagcctgcgttctgccgtttttaattcaaagaatcggatgtcaaaaggcgcattatatgacgattatgacaaagccagtgccggcacgccaggcgcttgaatggggactttgtgacgtatgcgtcccggactcagcaacagagctgagaaagcatttgctgcgtcttcgcccactgtcgaaaaaagcagtcatccgctataaacaatacatggattccttaaacgaccttgttcatcgttcgaaatccattgctctagccgaaaatcaagcgatgttttcagatccggataaccaatcagccatcttccgttatgcagaaacggggcggcttccttgggaaacggagaacagttaggaggatatcatgccgaacgccgcagttgaactgctcgaaattgaaccggatattatccaagtgacaatgcaggataaagcccataaaaacgccttctccaaagaactgacggatggattgatggaagcattcacccgtataaaaaaatcgtcagtctataaagctgtgattttaacagggtacggccattactttgcttccggaggcacacaggaaggcctgctcaggattcagcagggcatcacgaagtttacggaagaccgcatgtactctttggcgctggaatgtgatatccccgtcatttccgccatgcagggacacggaatcggaggcgggtttgtcatggggcttttcagtgattttgtcattttaagcaaagaaagcgtgtataccgcaaactttatgaaatacggtttcacccccggaatgggcgctacctttatcgttccggagaagcttggggcaagcctcggccatgaaatgctgttaaacggcggccactaccgcggcggtgacctggagaaaagaggggtgccttttccggtgcttcctcggcaggaagtactagactatgcgcaggaattggcccgtgagctagcagaaaaaccgagaaactctttaattacattgaaaaggcacttggtgacgccgtttcgcgagcagcttccggccgtcattgagaaggagttaatcatgcacgatgagacgtttcatgatgatgaagtgaaaaaacgaatcacgacgatgtacggagtataagacatacatcttacatacagatgaaatggaggcagctctatgaaaagtgatatgaaggcaagcgggttactcaagccatctgtcagctatggaaaatcattgcggctttcagcggatcagccgatgacgattcctgaagtcctgcacaaaaccgccgcggcagcgggagatcaaaagggcatcacatatatacagcctgacggcaccaaagtgtaccagacttacagcagcctgaaaaagatcgctctttcgattgtgaaagggctccgccaatcaggagtgaaggctcaggatgaagtcatattacagctcagtgacaattcccagctgattcctgctttttggggctgtgtttttttaggagcgatcccggttccgcttgcggccgctccggcttatacagaaatgaacagcgggacgcaaaaactgaaagacgcctggacgcttttgaatcagccgtatgtcatcacaagccgtgacgtgctgccggagatgactgaatgggcggaggagcaggagctttccgggttttgcgctttggcggcagaagatctcagtgcgcacgaaatggatacggactgtcatcatccccgtccggaagatttggcgatgctgcttttgacctcgggaagcacgggcacgccgaaagccgtgatgctcagccatgaaaacatcgtctgcatggtcaaaggaaatattcagatgcagggctatacaagtgaggatgtcacgtttaactggatgccttttgaccatgtcggcggcatcggaatgcttcatctgcgtgatgtttatctcggatgtgaggaaatcaacataccgagcgaatccattttgatggaccctttaaaatggctcgacctgattgatcattaccgcgcttcggtcacgtgggccccaaattttgcctttgggctgcttgctgattttgcagaagagattcaaacgcggaaatgggacttatcttccatgcgttacatgctgaacggcggggaggccgcggttgcgaaagtcggacgcagaattatggagcttttagagccgcacggtctgccggctaatgccatccgtcccgcatggggaatgtccgaaacgtcttcgggcgttattttctcagatgagtttacattggaaaacacgagtgacgacgatcgtttcgtcgagatcggtctgccgatcccgggatttaatatgagaattacggatgaccgcaatcaagtggtggaagaaggagaaatcggccgcttccaagtgtcgggtctgactgtaacgagcggatattatgagcgcccggacttaaatgagagtgtctttacagaagacggctggtttgaaacgggagatctcggatttctgcgtgaaggccgcctgacgataacggggcgcacgaaagatgccatcattatcaacggtgtgaattattacagccatgccattgaatcagccgttgaggaattgccggaaattgaaacgtcatatacagcggcatgcgccgtccggccgaatcaaagcacgacagatgagctggcgattttctttgtgacatctgttccgttggatgagaaccgcatgacgaagcttattcatcacattcaccagcacgtgacacagagaatcggcgttacccctgattatctgcttccggtcgcaaaagaagacattcctaagacggcgatcgggaaaatccagcgcactcagctgaaacattcatttgaacaagggcaatttgattcattacataataacagacaagaaggcagcaattcagacacggcttctgcagagaaagaaattgaacgggattttatccgttttctgaaagaggaactttccatcgcggatgagctcgttgatccaaatacgccgtttcaaagtcttggcgtcaattccatcaagatgatgaaactcgccagatcaattgaaaaaacgtatcacatccggctgacggcaagagagctgcacaaaaacccgacgattggcgctttagcggcttatactgctgaaaaagcggcaaacatgtcagcggaccatcatccccaaaaagccgaaccgccggcagaacgggagagacggcaaacggcgccagcgctttcagaagtccaaaaagggctgtggacattgcagaaaatgtcgcctgaaacgactgcataccatgtcccgctctgtttccgattcacatccggaatcgacaaagagaaactgaaacaggcgtttcagctcgtattaaagcagcatccgatgctcaaaagcgccgtgaatgaaacagacggcgggttttatttcatagaagcggcagatccttttgtattctcggaagaagatatttctgacgtcaatgaatcacaaatatccgctctgatccggaaaaaagtgaaagagccgtttgtcaaagaaagcggacctttactgcgcgtgcagctgctttcaaaatccgccgaggaacattatcttttgacggtcattcaccacatcgtgtttgacggcatttcatccattacatttattcacagtctgctggatcattatcaggcgctgctggagggaaaagaagagtttacggctgccgcttccggcattcatcccgatttcgcggcttgggaaaagcggtatttagcgggtgaagaaagcaaagctgcccgcgcttactggatgaaacagctcgggggcgatctgcctgaccttcagcttccgccgatgcgcacggacagcagtgttgcggagtttacagaagatacgctgacacgccgtcttcccgaacggctgctgaataatttaacggcgtttgccgcatcccgttcgattcatttgtctaccgtcatgctgagctgttacatggtgcttttaagcaaatatacggataaggaagatattgtgacaggcatgcctgcaatggtcagacccgaagaacgttttgaccgagtggtcggccatttcctcaacatgcttcccatacggagcagagccggacgaaaagaaacatttgctgactttgttcaaaaggtgcaggatgccgttctggacggactggatcactccttttatccgtttccgaaaatggtgcgtgatgtgcatgcgaaaccccggcagaacggttcgcctgttttcagcaatgcctttttctatcagaactttctgcagcattcgagctatcaatcgatgcttgatgaatacaaggaattctcctgtgagtttgtaaaagacattcatcaagagggggaatatgatcttgtatttgaaatgtgggaagaagcatcaggcatggatcttacgattaaatacagcaccgaattattcgacgaagcaggggcggccagacttttcagccaatttgtacaggctgctgaagctttgacggcgaatccggatacgccgcttgagaacgtttctctcatgacaaaaagagaggagcacatgattcttaatacttggaatgagacaagccgtgaatatccggatgcctgcttccatgaattattcgaacgtcaggcggcagaaacgccggacgcttgtgcggtcgtgtatgaagagcaaaagctgacgtaccgtgagcttgatgaaaaaagcacgaagctggcgctctatttgcaggcgcacggtgcaggccctgatgatctcatcggcatttatacagaccgatcattgcatatggctgtcggccttctcggcattttaaaagccgggggagcgtatgtgccgcttgatccttcttatcccgctgacagattggaatatatgatcaccgacagcaggatttcaatgtgcctgacgacagctgatttagagcactctttgaactggggaggcgtgcagacaactgccattgaccgcgattggtctcgtattgaaagtacagccgcggaaagaacgtcgctgaagcggttagtgacacctgacgatctggcgtatgtcatttacacgtcgggcagcacgggcaaaccgaaaggcgtgatgattccgcaccgggcgctgaccaatttcttactctcgatggcgaatgaaccggggctttcgtccgaagacaaactgcttgccgtcacgacatattgctttgacatcgcggcactggagctttaccttcctttaatcaaaggagcggagtgcaacatctgtaagacagaagtcacaaaagacgcacggaagctgaaagagctgattcaagagtacaaaccgacgatcatgcaggcgacgccgtttacgtggaaaatgctctttcattccggatggtcaaatgaagaaaatgtgaaaatcctttgcggcggtgaggcccttagcgaacaattgaagcagcagtttctcgatacgaaaagcgaggcttggaatatgttcgggccgacagagacgacaatctggtccgcggtgcagcggataacggaaaatgagaacgcgcttacgatcggacgcccgatcgccaatacccgcgtgtatattatggattccggtctcaaccctgttttagaaggggtgccgggagaactttgtattgcgggagacggattggcaagagggtatttcaacaagcctgagctgacagataaagctttcgtcagccaccggctcgaactgggatcaaagctttataaaacaggtgatatggcgcgttttctccccggcggccgcattgaatacatgggacggatggatacccaagtcaaaatccgcggctaccggattgaacccggagatattgagagcaggctgaatgcccatccggccgtacaggaaagtgtagtggttgtgaacaatcactccggaaatgagaagctttgcgcgttttatatccggaaaaacggagagccgcttccgtctgcaaaggaattgcgcaatcatttgaaacaagcgctgccggcctatatgacgccagcttcgtttatccgtcttgaagagctgccgcttacgccgaacggaaaagtggatcgcaagcttcttgctgcccgcgatctgacggaaaagcagccggacacacaaacattttcatcatctcatatccagcaggcggtgctggcgatttggcaggatgtattgaaaagcaaagatatagagcttgatgaccgcttttttgatgcggggggagattcgcttcttgccgtgactgtcactgaccggatgacgcaggaactggattgtgaattcagtgtaacggagctgtttgaatacgcgacggtaaaagacatcagccggtatatcgctgaacaaaaaccgaaagaagcctttttggctcctgtaccgcaaaagaaagtgaatgcagaagaccgggaacatccggcgggagaatttcccgattattacgaggacagccttgcggttatcggtatatcctgtgagtttccgggagcgaaagatcattatgaattttggaataacatcaaagaaggcaaagaaagcatcaccttcttttcaaaagaagagctccgccgattcggtatttctgaagaactggctgatcatcccggcttcgttccggctaaatcagttttagaggggaaagaaatgtttgatcccggtttcttcggcttttcaccgaaagatgcggaatatatggaccctcagctgagaatgcttttgctccattcatggaaggcaatcgaggatgcggggtatatctccaaagaaattccggaaacaagcgtgtatatgtctgccagcacgaactcttaccgcagcctgctgccggaggagacgacagcacagctggaaacgccggatggctacgtgtcatgggtgcttgcccaaagcggtacgattccgacgatgatttctcataaactcgggttgaaagggccgagctattttgtccatgccaactgctcatcttcgttaatcggcctgcattcggcttttcaaagcctgcagtccggcgaagccaagtacgcccttgtcggcggtgcgacccttcatacggaatcaagcgccggatatgttcatcagccggggctgaatttttcaagcgacgggcatattaaagcgtttgacgcggatgctgacggaatgatcggcggtgaaggggccggcgccgtgctcttgaaaaaagcgtcggatgccgttaaggacggcgaccatatttatgcgctgctgcgcggaatcggcgtcaataacgacggagcggataaggtcggattttatgcgccgagcgtcaaaggacaggctgaggtcattcagaaggtcattgatcagacgggcatacatcccgaaacgatcgcgtacgtcgaagctcacggcacaggaacaaaactcggcgatccgatcgaactgtccgcacttcaatcggtgtacggccgatatacagataaaaaacaatactgcggcatcggttcagtcaaaacaaatctcgggcatttggatacagcggccggaatggcgggctgcatcaaggttgtcatgagcttatatcatcaggaaatcgcgccgagcatcaattacaaagagccgaatccgaatcttcatttagaagactctccgttttacgtagcgggagaaaagaaagagttaacccgtgagaacagagcgcaccgcatggctttaagctctttcggtcttggcgggacaaacacacacgcgatttttgaacaatatccggatgcatctgaagcagcagacgctgccggtccgttcatcattccgttgtctgccagaaaaaaagatcgtctgaaggagtacgcaaaacagctgctggcttttctggaaagaaaaacggacgccgacctcgctgatcttgcctacacgttccaagtcggaagggaagcgatggaagagcgcgcggcctttatcacaagcggcactgcggagctgaagcggcagcttgccgattttatcaatgataagccggcagtaacaggctgcttcagaggagaaaaacagcaggcgaaagatattgcctggctttctgatgatgatgacagcgctgaactcattgagaaatggcttgcgaaaggaaaaggaccgaagctctgtgaaatgtggagtaaaggcgtcgccattaattggcacaagctttacaaagacaagcatccgaaacgaatcagcgtgccggtctacccgtttgcaaaggagccgtactggccgaaaaaagcagaaaagaacacatctgccgcacacaccggagtctcagttttacacccgctcgtgcagcaaaatacgtcagatttggccgttcagcggttcagctcacggtttacaggctcagaatttttcctgaaggatcatgtggtcagggaaaaagcggtgctgccgggagcggcatatttggaaatgtcttatgaagcggtaaaacgggcgcttggcggcttattaaaagaccaagacagaataacgctccatcataccgtctggatgaagccgatcgtcgttcacgaacaagagcgccaggtccatattgcgctgttccctgaagaggacggcatcatctcatatgacatttacagcgtaaacgctgacggcgaagaagtgctgcacagccaaggacgggccgaaatcattaaggctgaacaagagcctgagagagacctttctgccatacaaaacagatgcacagcggacattcttgatccggcggccttttatcgggaaggccggagcagggggatgttccacggaaaagccttccaaggcattaagtccgcctttatcggtgataaagaagtgctttcggacatacagcttccggattctgtttctcacacgaatggacaatttacacttcatccgagcatcattgattcggctattcagacggcgacgatttgcattatgcaggagttttccggacaaaagctgattctgccgtttgcgttggaatatcttgaagtcatcaaagcatgcacgccgactatacgggcgcatgcacgtttcagcgatggatatcaaaccggtgattccgtgcagaaagccgacattgacctgttcgacgaaacaggagcgctttgcgtgaaggtgagaggattctctacgagagtgcttgaaggcgatgcagaatcggctcagcggctatcaggctcggaaaaggtcttgtttgcaccggtctggaaagaagccgccgcatccgagaaagcttctgtccatgctgatgagcatttgatcatactttgtgaagatgcctgccgtataaaagatgaagcggcatccggcctgaaagacgccgaactgttgattgcagaaggtgagggtgaaacagccgctgaacgcttccaaagctttgcgcagacaatcgccgaacacatccggcggatcatcagcgaaaaaaggcagggccgcattctgattcagaccgttatctcagcagacggcagccagcaattgtttgcggggttaacaggtttgttaaaaacagccgagctggaatacggaaaacttgactgtcagctcatcgaaatggaatcaatcggcgaaatgccggctgtcgctcaaaaactgaaaaacgacagtcatcggccgcatgataaacatatccgttataaaggagaaaaacggtatgtgaaggcttgggaagaaatgcatcccgcagggggcggcatcgtctggaaggacgaaggtgtatatctgattaccggaggcgcgggaagcctgggcttgatgttcgcaaaagaaatcgcaggtcgcgtaaaacacccgaaaatcattctgaccggccgctcaaatctggcagaagccaaacagcgtgagcttgctatgcttcagcactccggcgcaaatgtcgtctacaaaaagctgaatgcggcagaccggcgggaaaatgaagcgctgatcaaagagattacggcggaattcggaaagcttaacggaattattcacgctgcgggagtgatacaagaccgcttcctgctgcaaaaaacgaaggaagagttcagagaagtacttgacccgaaagtcatcggaaccgcttatttagatgaagccagcaaagactgcaatcttgactttttcgtattgttctccagtgtttccggcgttctcggcaatgtcgggcaggctgattatgccgccggcaacgcgtttatggatgcatacgccgcttacaggcaatcccttacggagaatggccttcggcacggaaaaacggtcgcctttaactggacgctgtggaaagatggcggtatgcaggcgggagacgagacggagaaaatgatgaaaaaagctttcggcatggttccgcttcaaaaggcgtcaggcctggctgcattttatgaaggaatggctcaggaaaagccgcaacttttagcagccgaaggacacgcagcaaaattaaaacagtcgttcctatctgtttctgaaactgaaaagccgcaggtgcagagtatagagcctgtatccgccgtttcgggagacaaatggcacggtgcgcttatccgattggtcagttcaattttaaaagtcggccaagacgagattgatattgatacggaactgagtgaatacggttttgattccgtatcgtttaccgtctttacgaatcaattaaatgaagcgtatcagctggagctggcgccgacgatcttcttcgaacacgggacgatccgcagtttagcagagtatttgacggatgaggcagaagccggccttccttctcagccggaagaaaaacacgatgcagaagaatctcttcaaacgcttcacaccgctttgacagccatggtaagcggcattttaaaagttgaccgtgaggacattgagacagatacggaattgagtgaatacggttttgattccgtatcctttaccgtctttacgaatcaattaaatgaagcgtatcagctggagctggcgccgacgattttctttgagtacggaacgatcagcaatctcgccggatatttggcaaaagagcatccgggccgtttcggcgaaaagaagaaagagtctccgaaaaaagagcaaccaaaagcccaaaaaccgaaaatgcagcggaaaaagcgcttcgcaacggtaatgaacgctgcggcagcgacacaagagccgcgccgcttggacccggttgccattgtcggaatcagcggccgattcccgggtgcaaaggatatagaggaattttggcgcaatttgaaagaaggaaaggattcgatcacaaccattccgaaagaacgctgggattggcaagcgtttgatgacgacccgaatcttgaagggaacaaaacgaatatcaagtggggcggctttatcgacggaatagctgaatttgatccgctgttctttgggatttcaccgcgggaagcccaatatttagatccgcagcagcggctgttattgacttatgcatggcgggcgatagaagatgcgggctgtaagccggaaagcctttccggcacaaatacgggcgtctttatcggcaccggaaatactggttataaagatttgttcacaagggcaggtcttgcgccggaaggacatgcggcgacaggcagcatgattccttccattggtccgaaccgtttgagctatttgttaaatcttcacgggccgagcgagccgattgaaacggcatgctcaagctcgcttgtggcgattcaccgggcggtatccgctatagaaaacggagaatgcgacatggcgattgccgggggaatcaacacgattctgacggaagaagcgcatatcagctacagcaaagcaggcatgctcagcaaagacggaaaatgcaaaaccttctccaaagatgccaacgggtatgtcagaggagaaggcgcgggaattctgatgctgaagaaactgacagatgcagaacgtgacggcaatccgatttacggcgtgatccgcggtacggctgaaaaccacggcggccgggcgaatacgttaacctcgccgaatccgaaactgcaggctgatttattggtgaaagcatatcggaaagcgggagtggacccgagcaccgtcacgtatattgaagcgcacggtacaggaacggaattgggcgatccgattgaaataaatggtctgaaagcggcgtttcacgagctggcgaaaacaaatcaagagcctgaagtctccggtcaccgctgcggcatcggttcggtcaaaagcaatatcggccatttagagcttgccgcgggagtatcaggcgtcatgaaagtgcttttgcaaatgaagcacaaaacgctggtgaaaagcctgcattgcgagacgatcaatccgtacattcagcttgatgacagtcctttctacatcgtgcgggaaaatcaggaatggacggcagcaaaagatagaaacggaaacgccattccgcgccgggccggggtcagctcatttggcatcggcggggtcaacgcccatatcatcattgaagagtatgtcccgaaagcagccgctcagcctgagcacagcccggaaaatccggcaatcatccttttgtccgccaaatcaaaagaaaaactgtttgaacaggcgcagcagctgcaaaaagcaatccgtcaaacgccgtatacagatcaagacttggcgggcgtcgcttatacgctgcaaatcggaagggacgaaatggaagagcgcttggccattcttgcagcgacgatggcggaattggaaacaaagctggaagcatttacaaaaaacgagaaaaacatcgccgggctgtataccggccagtctcaccgcaataaagatacgtttgccttgttcacggcagatgaagatatggacatcgtcattgacgcctggattaaaaaaggaaaattcgccaagctggcagaggtatgggtgaaaggcggcgtattgaattggaaccggctgtatgaaaagggtacgccgcgtttactcagtcttccgtcttatccgttcgcaaaagacacgtattgggtgcctgagaatcctgacaaaaagaaggtccatacagaggaacggatgaaacgtattttgacgaaacaatgggaactgagcccgctcgaactgggtgaaccgtgcgcacgttccgttgcgattttgacaggcggggacacgatcaatctcgcagaagagattgcagcgcatatgccgaatcaccgtattatcacaacatcagaccttaccggtgtatatgactggcaggcgtttggcggagtcatcgaccttctcggcgcagcgaaagaagaagcttctggagatatgaccggtatcaaatggcttcagcaattgattgagcatgggcataaagaagggataacactgctttgtgtcacgaaagaccttgagtcaatggggaaaaaggccaatcaaataacgggagcaaaacgggccggtctgtacagaatgctggcatgtgagtacggtcatctgtcttcaaggcatctcgaccttgaaggagcgctttctgatgacaaactggcgaagcagattgccgatgagtttcatgcccgtactgatgacgcggaagtttgccggagggacggcttgcgctaccgcgccgtattgagcggctcagaaaatatgaatatgcaaggcgagagaattgattttccggacaaccatgtgcttctgatcaccggagggacgagagggatcggtcttttatgcgcacgccattttgccgaacattacggagtgaaaaaactggtgcttacaggacgtgagacccttccgccgcgaagtgagtggacaggcggactgaatggggtgacggcttctgtaaaagcgaaaattgaagctgttctcgacttggaatccaaaggtgtacaagtgaaggtattgtcagtcccgttagctgatgaagccgggctgagacaggaactgagtcagataaaacagacgctcggacctatcggcggcgtgattcactgcgcgggtgtgaccgataaagagacgctcgcattcatcagaaaaaccgatgaagacatacagcgcgtgctcgagccgaaagtagacgggcttcaggcgttatacagtgtgctcagcgaagagccgctgaagtttttcgtcttgttctcttccgtgtcagctgcgataccggcgctttcggcaggacaggccgactatgccatggccaatgcgtatatggactattttgcaaactcatacaaagagcagctgccgatcgtaagcattcagtggccgaactggaaagaaaccggaatgggcgaagtaacgaacaaagcttataaagagagcgggctatacagcatcacgaatgcagaaggattacagctccttgacggcatacttcttgaatcagcaaggggcccggtgctgccggccgttctgaatcctaagctgtggaagccggagcgattcctgcggcggagcaggcaggatcaaccaatgagtccggctatggtaaaaccggcggaaaaaaccgctgatactgccgcagacaacgctcaattaacaaggaaaacagaagaatggctgaaagaattattttctgaagagctgcggattgaccaggatcagcttgagacagacgtattattccaagattacggagtggactccattatccttgcccagcttctgcagcggatcaatcggaatctctcggcatcgcttgacccgtccattctgtatgaatatccgacgattcaatctttcgcaaattggcttctcgaaggatatacagaagttttgttggaacggtttgatttggcggcggcggagcctgttctgaagaagccggctgagccggtgattgaaacacaagccgttaaggtgcaagaagagccggccggaaaacagattcaccgggaagatatcgcggtcgtcggcatgtcctgccggtttccgggagcggcttctttagaggcgtactggtcgcttttggctgaaggccgttcggctatccgtcctgttccggctgaacgatgggggtggaagacgccttattacgcgggaatgcttgacggaatcaatcaatttgatccggacttctttttactggcagaagaagatgtaaaggcaatggaccctcaagctttggccgctctggaagaatgccttaacctgtggtatcacgctggctatatgccggatgagataaagggagaagcaataggtgtgtatctcggcggacgcagccgtcacagaccgggtgaagagaaactgctggatgcgaaaaacccgatcgtcgcgctgggtcagaattatttggccgcaaatctctctcaatattttgatatgcgcggcccgagtgttgtcctcgatacggcttgttcttctgctttagtcggaatgaatatggccgtgcaggctcttgtaacaggagaaataaaagcggccgtcgtcggcggcgtgagcctgtttgaatcagaagaaacccataaattatttgaacagcgcggcatattaagtaaagcgcagtcgttccatgtatttgacgaacgcgccgatggagtcgtgctgggcgagggtgtcggaatggttctattaaaaaccgtgtctcaggcgattgaagacggagattctatttatgccgtagtgaaggcggcatccgtcaataatgacggaagaacggcaggcccggctacgccgagtctggaagcgcaaaaatccgtcatgaagacggctcttgaaaaaagcggaaaacagccggaagacattactcatattgaagcgaacggttcaggcacggtcgtgacggatctgttagaactgaaggccattcaatccgtctaccgttcaaaagacgccggcccgctcggaatcggttctgtgaaaccgaacatcgggcacccgctttgcgcggaaggaattgcaagtttcataaaagttgttctcatgctgaaagaaaagagctttatcccgtttttatcaggcgagcatgaaaatacacattttgatagagaaaaggccaatattcagttcagccgcactctggcagactggccgtcaccaataccggcggcaggaattaactgctttgccgacggcggaacaaacgcccacgtcattgtggaagcgtggcaggaagacgaagggcgccgagtcaagcgccatcctttaacaccgcctgcattaaataagcggctgatttcgccggacagcaaagaagaaacgaacgaaaaagctgcggcaaacatctgggatacctatgaagtggaggtttaacgtgaagaacttcaataagcaaatcactttatcgctgaaaaatccgtttattttacatcatgacgtttacggacaaaaagtccttccgggattggcttatattgatatgttttatcagattttcaaagagcgcggctattcatacgacgggcttcagctgcgccatttatccatatatcagccgcttattgcgaaagaagacagcgccgtcaagcttacggttgaatgtacaaaggtaaaagaagggcgctggaaacttaccgcaaaaggggctgaggtcagcggcgggcgagtacagccggaagaacgtatttacgtcaaagcggaaatgcacgagacggcacccgcaattttcagtgacacgcttgatcttgactctgtcaaacgcgaggcggaacgcaccatcgatttaaatgagctgtatgcacaatgcagaagccaggaattggttcacagcggatatatgaaagcagaaggagaagtgtttgaggagcgggacggcgtcatctttgatgtatcgctcggaaaagacgcgatgggacaggccggggggtttttgttccatccgactctccttgacggaagcggcgtcggcgcaaacctattgatctcatcgctgttaaatggggaaaagaggctgtttctgcctcttttctacgaatcttttacagcttccgaacctttgcagagcggctgcatcacgagaatcaaacgttcgtcgcttcggcaggaaaaggagctcatttacattacactggagttttttaacgcatccggccggaaagtagccgagctgaaagatttcacaagcaagctcgtgcgggatgccgagctgatcaatacagaacgaaagactgctgagaagtctactgaaaaagccggtttaccggaagttgcggcatcgcttgaaggcggacacccgcatgaggaagcagaacggtatgtcatgaatctgatggcggaaaaaatcggcaagccgcttgaacagattgattctcaagtcggctactatgaaatggggctgacatcgtccggactgcttgacgtcgtcgaaacgatcagcgaaaaaatcggcgaaaccctttctccgactttgctgtttgaatatacgacggcagcagagctggcagctttcctgactgagcagtacgggagccatttcaacgcgcctccggcaaaaatggcgaagccggttgagccgcaaacagaaaacaggcggaaaagcagtgttccgcaagatgaagatatcgcgattatcggcatggccggccgctatccgcaggccgaaaatattcatgaattctgggaaaacctgaaagaaggaaaaaactgtgtcaccgaaattccggagtctcgctgggactggcgccggtttgaaaatgtaaagtcgccttccggaaagagcatttcaaaatggggcggatttattgatgatccggattgctttgatccccaatttttccggattacgccgcgggaagctgaaacaatggaccctcaggaacggctgtttttacaaacatgctgggaaacgattgaggatgccggatatacgccgaagtcgctcgcagaggcgcgcggacggaataagagacagcgcgtcggcgtcttcgcaggggtgatgcataaggattatacgttggtcggggctgaagcttcttctgaagatcatgtattcccgctttctcttaattatgcgcaaatcgcaaacagagtttcatatttttgcaattttcacgggccgagcatggcggtcgatacggtctgttcatcttcgctgactgcggttcaccttgctgcggaaagcattcggcgcggggaatgtgaatcggcggttgccggaggggtcaatttgtcgctgcatccgaataaatatctgacatacggtttatgggacatgttttcaacagacggggtttgtcatacattcgggaaagacggagacggctatgtaccggctgaaggaatcggtgccgttttattaaaaccgctgcgagaggcggtaaaagacggcgaccggatttatgcggtgataaagggcagtgccgtcaatcacgtggggacagtgagcggaatttccgtgccgagtcctgtcgcgcaggctgatttgattgaagaatgcctggacaaagcgggcatcgatccgcgcacggtcagttatattgaggcgcacgggacgggaacttctctcggcgatccgatcgaggttcaaggccttgtcaaggcgttccgccagtacacacaggacaaacagttctgttcgatcggatcagtgaagtccaatatcggccatgcggaatcggctgcgggcatcagcggcttaagcaaggttgccctgcagcttcaccataaaactttggtgccgtctcttcattcggaggagctgaatccgtatttagattttgaacaatcaccgttttacgtccagcatcataccgaagcatggcagcagccatcagtgacggaaaacggaaccgaaaccgtatatccccggcgtgcgggcatcagctctttcggggcgacaggttcaaacgtgcatctcattctggaggaatttatccctgaagaatcacacggaacaaatgctgaaccggcagaagaacagacattcattttcccggtttcagcccggaatgaagaacggctaaaagagtatgttgcgaagctgtctgcatttattcatcccggcctgccgcttgaggatgcggcgtatacacttcagatcggccgtgaacagatggaggagcgggttgcgttcaccgctcagaatatgacacagctcaaagagcggctggaaggctttctggcgggtaaaacggtcagcgggtgctggcggaaccgagctgataaaagcaaacaggcagagcttgctccggacttgatacataaatggctttcttccgggagactggagatgattgccgaaaagtgggccggcggaggaacgatggattggaatctcttgtacggtgaaaacaaaccgaatcggatcagcctgccgacgtatccgtttgaaaaaatccggtattgggtgccgaaggcggagaaaagagaatcgctgccgcaaaaaaatgcaggcatgctgcatccgctcctgcatgaaaatgtatcaaacatgtcaggcgtccgttttcggtcctcgtttagcggcggagaatttttcctgaaagatcacgtcgtcaaaaacgagcggacgttaccgggcgcggcttatctggaaatggtccgggcggccgttgaacatgcggcagaaacgaaggaagaaggaacagtccggctgaaacatgtcgtatggatacgtccgtttacagcggcggatgagtccgcagaactgtatctccgcctttatgacgaagaaaatggagagatgggatttacggtttacagtgaatcggcttcctcggaagaagagcccgtactctatgcgcaaggaagcgcagcgtttgtccgagcgggcgaaccggccaaaatcgagattgacaaattaagagagtcacgccgtctgatcacacctgacgcttgctatcaggcatacaaacagatggggattgaatacggggatgctcacaaagcggtcacggaaatctatgcaaaagacagcgaagtgctcgcgaagctctcactcccgtcatctatttctcatacaaaagatcagtttgtcctccatccgagccttttggatgcggccttccacgcgacaatcgggttaatgcttgacagagacgggactgacatacggccgatgctgccgtttgctctcgaacagattgatgtgttgaaaagctgtaaaagcgatatgtgggtttccattgcgtacagcggcgaaagcaagcctgaagatgccgtgcagaagctggatattgatgtatgtgacgaacaaggcaatgtatgtgtgaaaatgactggttattccgcacgggaaattgaaacggataaaacagatacactatattttgaacacgtatgggaagaaagggccgctgtacatgaaaaagcgccgatccatttcaaagcccgtcacgtgatgatatctgaccggtttacggatcaaatgaacagcatacagacagacttcagctgtcatgtgctccgtgatcagcataagagtgaagacgaacgatttgaagcttgtgcgcttcaggcgttcgaagaagtgaagaaaatcctcgcttcaaattccggcgggcgcgagctcattcagattgtcgtgcctcaagaagcggatacgcagctcctttgcggtttaacagggcttttgaaaacagcggcgcttgaaaacccgaacttgacaggccagctgattgaaacggagccggacgtcaaggcagacacgctgtcccgatatgtaaaagaatgcagcgctcatcctgatgacaagcatattcgctatgaaaacggcaggcgctatacggcacaatggcaggaaacagggcttgaacagttcggcgccgaaaagccgtggaaggataaaggtgtttatctgatcacaggcggtgcgggcggactcggatttttattcgccaaagaagtcgcccggcatgcaaaagacgccgttcttattttaacggggcgttctctgttggataaccgtaaaaaagcccagcttcaagaactgtccgatctcggcgcgcaagccgtgtacaaacaaacggacataacggaaaaacaagaagttcaatcgctcacagcggacatctgccggcagtacggcggattaaacggtatcatacacagcgccggaacgataaaagacaactatattttgaaaaaggacaaggatgaaatccgtgatgtactggcgccgaaagtctccgggctggttcatcttgatgaagcggcaaaggacattgagcttgattttctgattcttttctcttccggagccggaagcgccggaagcgcgggccaggctgattatgcgatggccaatgcgtttatgaacgccttcagtgaaaaaagaaaccgtaaaaaagcccgaaatgaacgctatggacataccctttcaatctgctggccgctttggaaagacggcggcatgacggttgatgctgaaacggaagccatgctgacaaaagaaagcggcatggtccctatgcaaacagaaaacggcattcaggctttataccgcgggtgggcggcaaacacatcccaagtcatggtgacggaaggctacgccgcaaaaatccgggcgtttctgaaaaaatcagcggatgatcagccggataagggcagcgaaacggaagaaacggcaggtcgtacagcaggcggagagaacatgcttgcagaaaaaacggagcatttcttgaaacaagtgctttcggaagtgaccaaacttcctgtcggcaaaattgatgccaaggcgcctatggaagattacggaattgattcgattatgattatgcatttgacgggccggctggaaaagagcttcggctcattatcaaaaacattgtttttcgagtaccagaatatcgaatcgctggcgcagtattttatgaaagcacaccgggacacgctgctggaagtgaccgggatgaaaacagaagaaacccctgcagccaaacctgcgctgtctgagaaagcgaaagtaaagcccgttttcaaacggaatgaaggcaaaaaaggctttgcgcaagtccgtccagacacgcggaaaaatcagcagctgacagagcgtgaagatatcgcgattatcggtatatcaggacgatatccgcaggccgaaaatcttcaggaattttggaagaatttgagtgaaggcactgactgcataaccgaaattccaaacgatcgctgggatcacagtctttattacgacgctgataaagataaagaaggcaagacgtacggaaaatggggaggatttttgaaagacgtggacaaatttgatccgcaattcttctctatttcgccccgggatgcaaaattgatggacccacaggagcggttattcctgcaatgtgtctacgaaacgatggaagatgccggttacacgcgcaaaaagctcacggaaaaatcgggtgatttgcttggcgccaatgtcggtgtttacgtcggcgtcatgtacgaggaatatcagctttacggagccgaagaacaggcgcgcggaaaatcgcttgcgctgaccggaaatccgtcatcaattgcgaacagggcttcctatgtattcggttttaacggcccgagcatggctctggatacgatgtgctcttcttctttaacagccattcatctggcatgccaaagcttgcggaacggggaatgcgaggcagcatttgccggtggtgtcaatgtatccgttcatccgaataaatatttgatgctcggccagaacagatttttatcaagcaaaggcagatgtgaaagtttcggagaaggcggagacggttatgtgcccggtgaaggagtgggcgccgtactccttaagccgctttctaaagcgaaagcggacggtgatcatatttacggcctgatcaaaggaacggccgtgaaccatgatggaaaaacaaacgggtattccgtaccgaatccgaacgcccaagccgcggtgatcaaacaggcgttaaaagacgcgggaaccgatccgagggcggtcagctacatcgaagcccacggcaccgggacttcactcggcgatccgattgaaatcacgggtctgacaaaagccttttcagaacaaacacaagataaacagttttgtgccatcggctcagcgaaatccaatatcggccactgtgaaagcgcggcgggcatcgccgggctgacgaaggtgctcctgcaaatgaagcataagcagctcgcaccgtcactgcattcccggacgcttaacccgaatattgattttccgagtacgccgttcaaagtgcagcagacgcttgaagagtggaaaagaccggtcataaatgaaaacggagtaaataaagaattgccgagaaccgcggggctttcctcattcggagccggcggcgtcaacgctcatattgtcatcgaagaatattccgctgatgaggataaggagacggcttatgctgcgcctcatccgtcgatgatcgtcctttctgcgaaaaatgagcaacggcttcaaaaacgggcgaaacgtcttcttgatgcactgcggagcgggcgttaccgggaagcagatctgagccggatcgcatatacgcttcaaatcggccgtgaaccgatggaagagcgtctcggaatgatcgtcagcaatttacgcgagcttgaagagaagcttgacgaatttacgggcggcaagaagtcaattgaccagctctaccgcggacaagtcaaacagaataaagacacgatggcgctgtttgcggctgatgaggacatggaaaaaaccattgaggcgtggcttgaaaaaggcaaagccgcaaaggtattagagctttgggtgaagggccttccgctgaattgggataagctgtatcaaatgggcagaccgcaaaaaatcagtcttccggcctacccgtttgcaaaagacagttattggatcgacatatcagcagatgcagctgtcaaaagaccggccgaaacacagtctgcgccgatcgcaccggcggccgccccggaaccggtcattgaagtaacaactcttcacgaggagactgtcaaagaaaaaccgtcaaacattacactgcagtctttgagcggcgcgaaaccgaaaagaaccgtacagcccgcttcccgtccggcggtttccgctgaaaaagtaagtgccgtattgaccgaaagtttggcagacgttttatatatggatgccgacgatatcgacgcagacgacacatttattgatatcggcatggattcaattacaggtcttgaatggataaagtctgttaataaagcatacggcacgtcccttacggtgacgaaagtatatgattatccgacaatccgccagtttgcggccttcttgcaaaaagagctcgggacagaaccgatccttgaggaagcaaccgaaccgcagaaaacagaagccgtgaaaaaaccgtcaaacatcatgctgcagcctttaaacgctcataagcagcatgtgatccaagcagaagcggatattctggaggcgatgtcagaaacggcagcttccgccgaaccggaagaaccgattgaagcggtgcatgatgagttatcaaaagcactggctgatgtattgtacatggagcggcatgaagtagatattgatgaggcctttattgacttgggtatggattcgattaccggtcttgaatggataaaggccgtcaataaacggtacggcacggactgtaacgtaacgaaagtgtatgattatccgacaatccgtcaatttgccgattttctgcgtacgcagccgtctgtccgcggaagaaaaaaacagacggttcccgtacgtccaaagccgcttacgcagcaacatgccccgcaggagaaaacacctgccgagccggagagattaacggttcaaaaggaacctgaaccggtgcaggccaaacgggagcctaaagacgagatagcggacgcgatagccatcgtcggcatgtcgggcaagtacccggatgcgccggacctaaagacatattgggacaacttagcccgtgcgaaaaacgccattcgcgacatcccgctttcccgctgggatgtaaacaaatactatgatccggccttaaacaagaagggcaaagtatactgcagatcaatcggtatgcttgacggcattgaagagtttgatccgctgttctttaatatatctccgtctgaagcggaacttatggacccgcagcaccggatatttttacaggaaggttttaaagcctttgaagatgcgggttacagctcaaaagaattaaacgggaaaaattgcggcgtttatttggggattatgaacaatgaatacggcatgatgttaaacaaacatcagacaggaggaagcgcgacgggcaacagtttcagcatcgcggcggcccgcctgccttattatctcaatttgaaagggccggccattccgatcgatacggcatgctcttcatctctcgtcgggactcatttggcgcgtcaggcgctgttgaatcatgaaattgacatggcgcttgtcggcggtgtgaccttgtatttaacgcctgaatcatacatcagcatgtgtgaagccggaatgctgtctcctgacggccaatgtaaagcatttgataacagtgcgaacggatttgtgcctggcgaaggcgcgggggcgctcgttttgaagaggctgaaagatgcggaagccgatcaagaccatatttacggagtcattatcggatctggaattaaccaggacggaaaaaccaacggcattaccgcaccaagcgcgaaaagccaaatggatttagagcgccaagtgtatgaagcgcacaacatccaccctgagagcatcacctatgcggaaatgcacggcaccggcacaaagcagggggatccgattgaattagaagccctgtcttctgtatttaaggaaaaaacggatcgcaaacaattttgcgccatcggttcggttaaatcgaatattgggcacacgtcggcggcggcaggtgtagcaagcgtccagaaggttctgctgtcgatgaagcatcagcagcttgtgccgacccttcatttcagcacgccgaatgaacattttgatttcgatgactcgcctttatttgtcaataccgaactcaaaccttgggaaacaggcggagcaccgcggcgggcctgtgtcagctcgttcggctacagcggcacaaacgctcatctcgttatcgaagagtatcagccgaaagaccggggaagccgaaagcctgatgagacaaacatttttgtgctgtcggcgaaaaaagcgcctcaggtaaaaacctatgccgagtctgtgatcgaatttgcaaaagccaatcagaatatcaatctttcagatatggcgtacacgcttcaaaccgggcgtgatgcgatggattaccgtcttgcggttacagccggttcgagagaagaactgatcagccgtttaaccgattttgtaaacggaaatacgggtgaagggatatatgaagcccatatcaaaacggctaaaaaagaaatcaaagcatttgaaacggacgatgacctgaagcagcttgtgaggtcatggttcgataagaaaaaatacgccaaaatagcggaattgtgggccaaagggcttcagatggactgggacagactctatcaaggcaaaaaaccccgcagaatcagtctgccggcttacccatttgcgaaggagccgtactggctgcctgagccgaaagccgtaccgcaggaaacagaagaccggcgcgaggctgtgcttttagaaaagcaatgggttccgtgtgagatcgattcggccggtgagaaaagcggcaagacggtcatgattctggctgatgcaagaacagcggagctagccgaagagactgcaaagcatttcgctgactcattcattctcccggtcgattcggctgacactgcagctagcgattggaatcacatagatggagcaatcgatctgacgggatgcggagacgaagacccttcactggaagggatcagccggctccagactctgattgatacaagccgccggcaagcgcggccgctgacgctgctatatgtaacaaaaggcttggagccatttcagcagaaaacgattcatcttgcaggagcggcaaaaagcggcctgtacagaatgcttcaaaatgagtatcaaaacgtgacgtccagacacatggatgccgatacagatacggatcagcagacacttgccaaacagattgcagacgaattttcggcggactgcacagaaccggaaatctgccgccgaaacggacagagataccgtgctttattcagggagattccaagcgggaagcgagcagaacataagcccgcaccgtttcctgaagaccatgtgcttttcattaccggaggcacgaggggactgggtctcttatgcgcccgccatttcacagaaaaacacggcgtgaaaaaagtagtgctgacaggcagggagccgattcctccccgtcataaacggtcagccgttaatacgaggctgaaagagaagatacgggcgattgaagagcttgaagcaaaaggagtgcaagtggcggtgatcagtctgaaattgtctgatcatgatgcggcggcagcggaaattgaaacgatccggcgcacgatgggaccgatcggcggcgtcattcactgtgcgggatcggttaattcagtaaatccggcgtttatcagaaagactgccgacgacatacaagaagtgctggaaccgaaagtcgcagggcttcaaacattaagcagccttttcacaaatgatcctttgcaattttttgtcttattttcttcagtatctgcagtcgttccggcgctcgcggcgggacagtcggattatgcgatggcaaatgcgtacatggattatttcgcggcggctcatcagcatcaatatccgctggtcagcattcaatggccgaactggaaggaaaccggattgggtgaagtccgcacagaaagcctgaagcagaccgggctgctgggactgtccaacgcggaaggacttgacttgctggaccgtattttatctgaaaacatccgcccgtccgttctgccggctatcgttgatcggagcgaatggcatcctgacaggctgctctgtcaagtgaaaacacaaaaagccgtagtaaacggcaaagccgcggaaaaacattcagacagagacctgtttcttgatacgaaggcgtggcttgtgaaactgttttccgatgaactgaaaatcgctccggaagaactggaaacagacgaaccgtttcaggattacggggttgattcgatcattttagcgcagcttttacagcaaatgaatcaagcgctcaaagaggacttagatccgtctgttttatatgaacatccgacgatcgatgcgtttgccgaatggcttgtatccaatgggcagccgctgcttgcagaaagggaggagcctgatacacaaatcttggttccggctgccgtacaaacggttcatactgaacaaaagcttgataccgtaactgaagacattgccgtcgtcggaatgagctgccgttttccgggagcggaatcgttagaacaatattgggacttgctgagaagcggcaggtccgcaatcggctccgtcccggcggaacgtttcggatatgcaaatcaatacgttgcgggattgattgacaatatggatcactttgattccgaattctttttcattccggaaaacgacgcgaaagcgatggaccctcaggcattggcggtgttggaagagagcttgaaacttttgtgccatgccggctattcccgtgaagaaatcaagggtatagaggccggtgtgtatatcggaggccgcagccagcatcagcctgatcctgaaagtcttgcgaatacccgcaacccgatcgttgcgggcgggcagaattatttagcggcaaacgtttcgcaattttttgatctgcgcgggccgagcatcgtgcttgatacggcttgttcatcggctttgacaggaatgaacatggccgttcaggcactgaggagcggcgatatcaaagcggcggtagttggcggtgtcagcctgctgaacacggatgcggcgcaccggatgttccaagagcgcgggctgttaaacgaaaagccggcatttcacgtatttgacaagcgttcaggcggagttgtcctcggtgaaggcgtcggcatggtgctgttaaaaacagtaagccaggcgcaaaaagacggcgacacgatacacgcggtcattaaggccgccgccatgaacaatgacggcagaacggcaggcccgtcagctcctaatatgcaggcgcaaaaagatgtcatgcaaagcgcgcttttcaaaagcggcaaaaagccggaagacatcagttatatcgaagcaaacggatcgggttccgctgtaactgatttgcttgagctgaaggcgattcaatccgtataccgctctggccagcatgttccgctcggcatcgggtcaattaagccgaacatcgggcatccgctttgcgcagaaggcatcgcaagcttcattaaagtcgtattaatgctgaagcataaacaaacggttccgtttctctcaggagatgaaccgatgccgcattttgatataacaaagacagattttcattttcataaaacagccggcgaatgggatgcagccagaccgtcagcagccatcaactgctttgccgacggcggaacgaacgcccacgtcattctggaagcttgggaagaaaaagacacccgaatgaaaagaaagccgctgccggtaccgtcattaagacgtaaggctctggtaaaagagcctgacgcaccggcggagaaacaagagcttcctgcgaaaaaaatgttttggaaagcatttaaatgagagaggagtgggaaggaatgatatcggaaaaaatcaatatctcactggatcatcccatcatgaagggccataaggtctttggtgaagcggtattgcccggtcttgcttatatcgatttgatttatcaggtttttcaggaacacggttatgtatacaatgagctcgaattgaagcacgttacgatttatcagcctttaaccgtcagtgaaacggctgcaatcattctgaccattcaatgttctgatagcggagatggaaagtggctcatctccctttcagggcagaaacagcaaggtgacgagctgtcagacaatatacaatatgcgacagctgaaatggtgaaaagagacgctgtgacatttgacgaaaccattgatttcggcgatgtgaagcagtcaggcagatctctgaatcttgatgacatgtataaccgctgcctggatcatgacttggttcattccggcatgatgaaatcgaacggacgattgtacgaaacagaagacggcatgctggctgagctttcttgcgaggaaggaaaagatttctttttattccatccggcccttttggatgcgagcggaatcggagggagcggtttgctttctgaaacaaaccggcttcacctgcctttatattatgaatcgttcacggccgccgacagactgcaatctgagtgcacggcgcgtatcgccgcttccggcgtccgtcaggaaaaagaactcacaacgatgacgatcgagtacttcagccgatccggacagaaggtggcggagcttaaaaacattacgggaaaagcagttcggcttgaagaagacgagaatacagccgaacagaatcaacaggctgcaactgagccggaaagcacagatgaaaaagacatcattctgtttttaaagaagcttttggctgataagcttaggcagccttgggagacgctggacgttcttgcaggctactacgagcttgggctggattcatcttctttgcttgagattgtacaggatatcaataaaaagacgggtgcggaccttgcgcccactcttctctttgaatatacaaatataaaagaactcgcagcctatctgaaaaagaccgtttcatttgaatgtgcggaacgtgcagccgaaccatcacggtctgaagctgaagcaccggacgcgccagaacatcataaaaacaccggagacatcgcgattatcggaatggccggccgctatccgaaagcgaaaagtgtggcggagttttgggaaaaccttaaggcaggcacggattgcatcactgaagttccgaagtcccgctgggattggagaacatataaaaacgtaacgtccccctcaggaaaaacagtatcaaaatggggcggtttcattgacgatgccgactgcttcgatccgcagtttttcagaatctcaccgcgtgaggcggaaacgatggacccgcaggagcgcctgtttttagaaacatgctgggaaacgattgaagatgcggggtatacgcctgaaacgctgggaaataaaggggagaaacagcatccgatcggcgtatttgcaggggtaatgcataaagattattccttaatcggcgcagaacaattatctgaaactgatccttttccggtttcactgaattatgcgcagatcgccaacagagtgtcctattattgtgacttccacgggccgagcatcgcggtggataccgtttgttcctcatcattgaccgccgtccatctggccattgaaagcatccgccgcggcgaatgtgaggccgcgcttgcgggaggggtgaacttgtcgctgcacccggcgaaatatctcagctacggaagcgtgggcatgcactcaagtgacggccgctgccgtacattcggcgagggcggggacggctacgtttccggagaaggagtcggttcggtcttgctcaagccgctggataaagccgaacaagacggcgaccgcatttacgcggtcattaaaggaagcgccgttaaccacgtcggaaaagtaagcggaattaccgtcccgagtcctgctgcacaggcagaagtcattaaggcctgtctgaaaaaagcaggtatcagcccgcggaccgtcagttatgtggaagcccatggcacgggtacttcgttaggagacccgattgaaattgaaggtctgtcaaaagcgttcagtcaagggacgcaggatcagcaattttgttccatcggttcggtcaaatcaaatatcggccacgcagaatcagcggcggggatcagcgggttaacaaaagcggcgctgcagcttcatcacaaaacgcttgtcaaatcactgcattctgcggaattaaatccttacctgaaatttgaggaatctcctttttacgtacagcagcagactgctccgtggaagcagccgtcagctaaagaaaacggtaaagtcacacattatccgcgcagggccgggctcagttccttcggtgcatcaggttcgaatgcccatatcattttagaagaatacattcagcctgaacaaaaagcgcctgcacctgagaaccatgcagcaaaactcatcccgctgtcagcaagaaataaagacaggcttctggcctatgcggaaaaactagcccgatcgctttcagaaaagacggtgctgtctgaactggcttatactcttcagacaggacgtgaagcaatggaggagagagctgtcttccttgtaaatgacacccgcgacttgaaagaaaagctgaatgatttcgtaaaagggaacgaaaacatccccggtctttggcgcggacaagccgagctgccggagatgagcgaagctgctcctgagacggatgatccgatacggcttgccgagttatgggcagaagggaaaataatagattggaataagctgtacgcttcgggtaaaccgcgtaaaacaagcgttccgacttatccgtttgcaaaagaacgctattggattccgcagcagaaaaaacaggagaaaagcccgtcaggcacagtactgcatccgcttttacaagaaaatacgtcagatttttcgcagcagcgcttcacgtctctttttacgggagatgaatttttcctatctgaccatgtcgtcaacggacaaaaaatactaccgggcgtcgcctatttggaaatggccagagaggcggtcaaaaaggccgctgtcgtgacggaaaaaggccatagcgtcacactcagacaggttgtttgggtccggccggtcatgattgaagacaaaccgaaagaaatacatattgccctttacccagaagataatggtgagattacctatgaaatatacagtgaggcagaaaacggcgaagatccggttattcacagccagggtgaagcggtcattaccgaaccgggaagcgcccagattgatatcgagtctgtcaaaacttcctgcaatttaggaattgtgactgcggaagaatgttacggtgcttttgagaagatcggtctggattacggagaggcatacaggggcgtacagcaattgctgatcggagaagaccgattattggcccgtatttcactcccagcagccgtacatgacaaaaaagaacagtatacgcttcacccgagtatgatggacgccgcttttcacgcatccgtcggtctgcttgtccgatcgatacatgacgatgcagacagccacgagctttctttgccgtttgcgatgcaggaagtggaagtgttcggaccgtgccctgaacatatctggtcatatatccggtatacagaaggcagcaaagcagatgacaacgtaagaaaatttgacattgatatgtgcgatgatgccggtacggtttatgtccggatgaaaggcgcgtccgtccgggcgcttgacacaagccaaacagcgggcggagaaacctcggaggcgcctgtcggccatacgatgctgattccggcttgggagcctgttgcgcttgaaaaagccggggaagcagcggcggataagcagacggcagtattcggcggaacggattcgagacatacgcgcataaaagaacacctgccgaacgcttcctattatccgatcagaggtacggatgatatcacatctcttacgcacatgcttgaaggacaaaaagaactggagcaaatcatttggcttgctccgcaggctgagagtgcggacagcctcaaagaacaggaaagaaacgttcttcatgtgttcaagctgatgaaagcattacttgccttagggtacggagaaaaacgtttggactggtgcatcgtcacagcaaatgcccagccgttttcggatcaagacagcgccgacccgtcacaagccgcagtcagcggacttgccggaacaatggcgaaagaatatccgcattggcatatccgcatgattgacacagaaacggacggcagctggccgatcgaagaggcgctcagtctttctgccgggaaaaacggtcaaatttgggcgtaccgcaatcagcaactgtttgagcggcaactgataccgcttgacaatatgccgaaaaacggcacgctgtaccaaacaggcggggtttatgccgtgatcggaggcgcggggtatcttggcgaggcatggagtgaatacatgatccgccgctacaaagcacgcatcatttggatcggaagaagcacactgaatgattccatacaggcgaaactcgaccggctcagcgcattcggcccggcgcctgaatatgtttccgccgatgccgccgacagtgcttccttagagagggcttatcagttcataaaagagcgccacacaaaaataaacggaatcatccactcggcaatggatctgtctgagcaaagcttaaataatatgaagacagaagagttcaaatcggtgctgcgggcaaaagccgatgtaagtgtgtccatggcggaggtatttggacgggagccgcttgactttgcgctcttcttctcctcgcttgtggcatttattcataacgtgaaacaaagccattatgccgcgggatgcgctttcagtgacgcatttgcgaaagaacttgatcagacatggaattgtccggtcaaagtgatgaattggggctattggggcaatagcgaagcggctgaagacggggattttattcagctgatggatcagatcggattgggattaatcgaaccggacgctgcaatggaggcgcttgaaacccttatgacgctgccggttgatcaggcggctttcattcatacgacaaaaccggtcgcagtcgaagggatgaatgaaagagaaaagatttccgtttatccgcctcagccgcttgtcttttcacaacagccgaaggtcgctccgcccggcgcacgtcttgttagagaggctgaacatcaggagcttgatgattttctgtatcagctgttgatcgcccagcttaaagaagcagacttgctgacgccgcaaagccttaaagcgtatgagcccgaacatgaatactttaaaaaatggctcaatcaaacgatcgctttccttctggaacatggctatctggaagggaatgcggattcatataaactgtcggcgcgagccgaaaacacaaccgccgcgctatggcaaaaatgggagcgggaaaaagaggaatggctcaataacgccgatacaaaagcgatgactgttttagccgagacgatgcttaaagcactgccggacattctgcgcgaagacgtgccggcgacagatatcatgttcccgcactcttcaatggaacttgttgaaggaatttataagcacaatcaagtcgcggattactttaacagcgccctgtcagatacattaacggcttatgtgaaagaaaacatcagcaaacattcaaaagccgagatccgcatactggaaatcggagcgggcacaggcggcacaagcgcaggcatatttgaaaagcttaggccgtatcaaaaccatataaaagaatactgttacaccgatgtatcgaaagcttttctcgtgcatgcggagacggaatacggcaaacggaatccttatctgacgtataagctttttaacgcagaagcgccgcttgccggccaggacatagagccgggcgcatacgacatcgtcgttgcggccaatgtgctccacgcgacgaaagacatccgccagacgctgagaaacgccaaagccgttttaaaagacaacggtttgctgctcttaaatgaaatggcgggaaacagcctgttcccgcatattactttcggactgcttgaaggctggtggctgcatgaagattctgcccttcgtattccggggtgcccgggcttgtatccggaaagctggaagcgcgtgttagaaagtgaaggctggcattctgtcttcttcccggcagaagcggcacatgaattaagccatcagattatagcggcaaaaagcaacggcattgttcgccaaaaaacgcttaaatcaggggccggaaaacggacctctccgccaaaagcagtacatgcgccggaacttcaggcgcaaacaacggtgcaaaaaggcgacacgtctttaacagaaaaaagcaccgagtacttgaaaacgttaatcggagaaacattaaaaattccgccggctcaaattgatccgaaagcgccgcttgaaaaatacggaattgattctatcgtcgtcgtacagctgacaaacgcgttacgaaatgtattggaccaagtcagcagcactttattttttgaatatcagacgattgaggcgctcgtcgctcacttaatcaaaacgaaaaaagacgcgatgatcaaactgacgggacaaacgcctgttcaggaagaacggaaggcatcaccagaaccgcaggctgtacagcctgctaagccgcttcgcactgactggcggcggagggaaaaacgggcagccaaagagaccgtccggcaaagttcggttcgcgacgtggccatcatcggtgtttcaggacgctacccgcaggcaaaaacagcggctgagctttgggctaatattaaaaaaggaaaaaactgcatagaagaaatcccgcgggaacgctggaactggcaggattactacgatgaagagaaaggtaaagaaggctctatttatacgaaatggggcggcttcattgaggatatggacaagtttgatccgctgttctttcagatttctcctttggaagcggagcgaatggacccgcaggagcgattatttttagaaacggcgtatgcgagtatcgaggatgccggctatacgcctgacaacctgtgccaaagcagaaaaatcggtgtttttgccggcgcgatgaacaaaaactacccgacaggctacggctattggtccattgccaacagggtatcttacctttttgatttccaagggccgagcattgccgttgatacagcctgctcctcttctttgacggccattcatctggcgcttgagagcatatacagcggttcaagcgaatgtgcgattgccgggggcgtaaacatagtgaccgacccgatccattatatgaatctgtcagtcatgaacatgctttccgcaggcgacacgtgcaaatcgttcggagaccgcgcggatggttttgtcgacggagaaggggtaggagcggtcgtattaaagccgttggaccgggcgattgccgacaacgatcacatttacggtgtgattaaaggaagcaccattaacagcggaggcaaaacgaacggatacaccgttccgaatccgaatgcgcaggccgccttaataaaagaagctttcgaaagggcaaacgtcccggcgcgcaccgtcagttatattgaagcccacggtacggggaccgcattaggagatccgattgaaatcgccggattaacgaaagcatttgaagaggatacaacagataaacagttttgcgccatcggctccgcaaaatcaaatatcggtcattgtgaaagcgccgcgggcattgcgggtctgacaaaaatactattccagctcaaagaccgccaaattgcgccgtccctgcacgcggaacagctgaatccgaatattgatttcgcgtatacgccgtttgccgttcagcaggagctcggtgagtggaaacgtcccgtcatcggcggccaagagctaccgagaagggcggggttaagcagcttcggcgcgggaggagcaaacgcccacctcgtcatagaagaatatacggcagacaaagaacctgatgagacgccggcagatcagcccgccatcatcgtcctgtccgcgaaaagcagcgaacggctcactgaaaaagcaaaacagctcagagacgccatccgtgaaaaaagatacagcggcagcgaccttatgagcatagcctttactcttcagacgggccgggtgccgatggaagagcgtctcggttttatcgtccattcacttcatgaacttgaagaaaaactgaatggatttacctccggacaaaacagcgccggactgcaccgtgacggcacggaagaaaacaaacggatgcttgccgtattttcggcggatgatgatctggaaacaatcatagacgcttggatcagcaaacggaaatattctaagctgcttgagctttgggtaaaaggattggacatcgattgggcgaaattatacggagaccgtcctccggcccgcatcagcctgcctgcttatccgtttgcgaaagaacgcttctggcatcagcagcctgtacaaagcaaggccgcgcccgttaacgcgccggctgatgaaagtgatccggcggaacaatttgaagtaatggcttttagagaagttcttaaagaacaggctctgccggcagccggagaaaagcaagtcaaaacggtgatttctttcttatctgatcagaagaagcagcaggaagccgtctctgtgatcaaatcgtatgacaatgacattgacgttatttttatcgctcagggagaccggtatgaggctctgtccgccggccgctgccaagtggtgcgggaagatccgcaatcatatgtgaacgcttttgcggatattcaaaaagagtacggtgaagcttctgccattttgtatttatgggcgcttgaagataaaagctgcatcgaagattattcatgtatcgtccatattctccaagcaatggctgagaccggtctgcagccggaaaggctgttattggcgggggaatatgcatccggtctggaaaggtgctacttggaatcatggatcggctttgagcgttcgctcggcattgttctcccgaaaacaagtgttaccggccacttcagaaaagccggtgcggccataacggactggatgagaaccatttgggacgagctgaaagctgaaacagaccaaaccgttttcttggaagagggaaaacgatatgtctatcacaccgaaccaaccggactaacgaaagaaaacggcaggatcagaaccggcggaacatatctcattacaggcggattaggagggctcggctacttatttgcccgccatctcgcccggaactaccaggcaaatgtcattctcacggggcggtcgccgatcaatgaagaaaagaaagaaaaaatgaaagacctggaaaatctcggcgcaggtgttctttacgccgaagccgatgtttgtgatccgatcggaatgggcgactgcatcaagcgcgcgaaagaacgattcggagccattcacggcgtcattcatgcggccggcatcgaaagcagaacatccgtctttgaaaatgaaatcgggaatttccgcagtacgcttgaaccgaaaataaacggaagcctgcttcttgacgagtggctgaaaaacgaaacgcctgatttcatctgctacttttcatccacatcggctgttttaggagatttcggctgctgtgattatgcggtcgcgaacaggttccaaatggcgtatgccaactataaaaacgaacaatcagaaagcggaaacgcttttgtcatcaactggccggtctggaaaaacggcggaatggccgtcggcggtgaagagacgacgggcatgtacctgaaatcaagcggccagcgcctgttagaaacagatgaaggcattgagctatttgagcgcgtcatttctcaagacaacacccagtgccttgtcattgccggcgaaagaagccgtgccgaacgatttttaggcatacggcgggacgattcatcaaaaccggatgcgcttttggaaaccgtgagccgccgcatcccggaagaaagcgcagaaaaacggctcgaagcggatttgaaagagctgatacacagtctgctgaaaatatcgaaagataaactcgtcctgcataaaaactgggcggaattcggatttgattccatctatttagccaaatttgccgctcttttgacgagtcattacggcattgaagtcactccggcgttattttacagctatgccacgctcggagacgtcatcagctattacttgacagaacacaaagaaacgatcgaaacgttttacagaacggaagaaaccgaaacagaagccgccgctccggataacaaggagaatacggatcaggagatcatcgccatgatgaaacaggtctctgaggggacattagattttaaaagagtgcaagacatcatagaagggagtaagacctatgaatcataaagaacttctcgatgcctacagatcaggaacgctcaccatcgctgaagtagaacaaaagcttcaggctttcaagcggacaactgcaaaacgtccgctttctgaaggccagaaaggtttgtggatgcttcagaaaatgtttccggagatgagcgcatataacattccgttatgctttcgttttcaaaagctggatatcgagacattcaaaaacgcccttttgtccgtgcagcgccagcaccctattttgaccagtgtgataaaagaggaaaacggccttccgtatcagatagaagatacggatcggcattttccgattgaagaaatggatctttctgaattaagcgggcgtgatgcgcttacgtttattaaagaaaaagcaaaagaaccgttctcgcttgaaaccgggccgctcctgcgtgttcaagtattccggcgggcgaagcgggagccgattgtgttaatcaccattcaccatatcatttttgacggcgtctctcttatgacgtttatgtcggcgctgctggacgcttatgtaaaagcaagtgaaggcaaagaacctgtcatgcttcagcagtccgcagattatcatgactttgtgaaatgggaaaaagagctgctggaaagcgaagcgggaaaagcgcatctctcttattggaaaaagcagttggaaggaccgctgccggtgcttgagcttccgtcggattatccgagatcatcggttcaaacttgcaaagggcaggcgtatcagcgcttgcttcctgatgaactgaaccggcagattaaagtttgcgcccaaaaaaataatgtcaatgaatccgttgtgtatctcgctattttcaaaggactgctttatcaatatacgaatcaggaagatgtcatcgtcggcatgccgacgatggggcgttctgaggctcaatttgagtctgtcatcggatactttattaatatgatcgcggtcagaagcagggagacgggcgccaaatcttttacgtcgtttttgaaggagctgcagctgacactggcagaagggctgtaccatgccgcgtatccgtttcccgcgcttgtcaaagaattgaagacggaacgctcgcctgcggtttcgcctgtttttcaaaccgcgtttttctatcaaaacttcttccggacagaaggagcggaaaagctggcggaactatatcaatcactcggcattgaaatgatagaagacattcatcaggaaggcgaatttgagcttgcgcttgaagtctataaaaaagaaacgggaaccgtcctgcaatttctgtacaacccggatgtctacagcccttctttcatcgaacgaatggcggagcattatatgaaactggcagaaaaggtgctttctgatccggagatcgcttttgaagcctgttccggcctgctcaatcaaaaacgggatgaaagccgttcatcccatcagccgaatgagcgctgcattcatgaagtgtttgcggaaaaagccggacgccaccctgacagagaagccgtcacattcggtgaaaacagtcttacatatcgcgaattagatgaacgaagcacggcgctcgctgtgtacctgcaagaaaagggcgtcacaccggaatgcccggtcggcatttgtacggagcgttcttttgagatggtcatcggcatcctcgccattttaaaagcgggaggcgcgtatgtgccgctggacccggcttttccaaatgaacggatggcgcacgtgttgactgacagcggcgtgtcaatcgtattaacgcaggaaaagacgcgcggcatgattgaacagttggccatcggcggtgtgagcacggtggaaattgaaaacagcggacgttctgtcagcggggcaaaactgacgccgcgttcaaaaccgcatcatctcgcttatattctatatacgtccggaagcacgggaaaaccgaaaggcgtcatggttgagcacagagccatcatgaatacgctgcagtttttggaagctgagtatccggtcgcacaagaggatgcctatttgttaaaaacgaattacgtatttgacgtttcgatttctgaattattcggctggtttatcggaaacggacggcttgtcattttgccgcctggtgcagaaaaaaatccgcagctttgcatggaatatatccaaacccaccaggtcacgcatctgaattttgcgcccgccgtgtttaatgtatttctggaaacggtaaagcggcatacggcatttacagaagacggccctgtgaaatatgtgatggtggccggagaggcgtttccgaaagatttagttaaaaagtcagtttccatcttcaaacatgccagaattgaaaatatatacggcccgacggaaacatccatttatgccgcttactacagctgcggccaaaaggaaatcacaagcaggaatacgccgatcgggaaaccgattcacaatacgcggctttatatcgtcgatgaaaagctcagccccgtccctgacggtgtggccggggagctttgcgtggccggcgccggtctggccagaggctattacaatcagcctgagctgacggcggcatcatttattgataatccgtttagtgaaggagaaaaactttacaagacaggtgatttggccagatggctgcctgacggaaatatagaatatgccggccggattgacagtcaggtgaaaatccgcggcttccgcatcgaattgggagcgattgaaacgaaattgagcgaacatccggatatccttgaccaggcggttgtggttcaggaaaagaacggacataaaaagctgattgcttattatacggcccgctccggtcatacggcagacgaaaaagcgctccgcaaccatcttttatcgagtctgccggattatatggcgcctgcccattttatccgtctggatgcgctgccgttaacaccgagcggaaaagtgaaccgcaaagacctaaaacagcgcaaggtaatcgttcaccggtctgaaaagacgggcagactgccgttatcagaagcggaagcgaaagtgaccgcaatatgggaagacctgctgaatacggcgggcatcaaaatcgaagacggctttttcgatgtgggaggcgactcgcttctggctgttgcggcggcagaacgcattaaacaggagcttgaatgcgattttaccgtcacggatttattcgaacactctaccattcaggcgatcagccgatttattgttgaaacaaaacaggcggctgaatcagtggcgcccggccaagatgagagagaaagagaacaaacaccgcaaaacggggtgccgtcttactttgatgacagtgtggcgatagtggggatctcctgccagttccccggcgcgaaaaatcatcatgagttttggaagcagttaagagaaggaaaggaaagcgtccggttctactcggaagaagaacttcgggaagccggcgtgcctgaagatttgatcgaaaatcccgactatgtgccggcattatcgacgatagaaggaaaagatctctttgaccctgagttctttcacatttctccgaaagacgcagaatttatggatcctcagcttcggcttctgctgcttcattcttggaaagccgtcgaggacgcgggatatgtatcgaaagagattccgaagacaagcgtatatatgtcggcaagcaataattcgtatcggtcgcttttgccggaaaaaacgacagaaggccatgaatctcccgacggctatgtgtcatgggtgttagcgcagagcggcacgattccgacgatggtttcccataagctcggattaaaagggccaagctatttcgttcattccaattgctcatcatcattagtcggtctttattcagcctacaaaagcataacgagcggagaatcggaatacgcgctcgtcggcggagcaactctgcatgcagcgaccagcatcggctatgtacaccaaaacggattgaatttttcaagcgacgggcatgtcaaagcatttgacgcttcagccgacggtatggcgggcggtgaaggagcggccgtcattctgctgaaaaaggcgtcacaagccgttcaggacggagatcacatatacgccatgctcagaggcatcggtctgaacaatgacggagcggataaagtcggtttttacgcaccgagtgtaaaaggtcagactgacgtcatccagcatgttttagacagcacgaatattcacccggagacgatttcctatatcgaagcgcacggcacaggaacgacattgggtgatccgattgaaatgtccgcgctgcagcaagtgtataaacgttacacggaccgggagcagtattgcgggatcggctccgtaaaaacgaatatcggacatttggatacagcagcaggtctggccgggtgcatcaaagtcgccatgagtttatatcatcgggagctggcgcctaccattaattacacgtcaccgaatccgaatatcaaattcagcggttcgccgttttatgtggcggataagagaaaaccgctgccggagagagagacgccgcaccgcgcagcgttaagctcattcggactcggaggaacaaacgcacacgccatttttgaacagtatgaaaacaaaacgatcagcggatcaaatgacggacagccgccttatatcgttccgctgtcagcgagaaataagcagcgtcttactgcctatgcatcttgtttatccggctttctggatgaagccgaaaacgatgtttccttgcatgatctggcatttacgtatcagaccggacgtgaagcgatggaagagagggccgtttttatcagtcatgatcgtcacgatctgaagcgtcagctgcaggatttcatcaacggcaatgaccaaaacatcttacggggcgaaaaagtgagaagcagagaagtgtcagctcaggagatggaagagcttgcggcatgtcagacacgggatgaaaagctgaaagcacttgcggcgctctgggttgaaggagcgcgtgtcgattggcgcttattgtatccggattccgcgccgcaaagaatcagtgcgccgacctacccgttcgcagaggagcgcttctggccggaagaaaccgtgaagcaaacggataccaagcttttgcatccgctggtacatcagaatacatccgtcttgcaggagcagcggttcagttcggaattcacgggaaaagagtattttattgccgagcatatcattaaaggaatggcgatcgtgccggctgccgttacccttgagatggcacgggccgcggcggagaaaagtatcggcggggcaacagaggaatctctgggcctgcgcttaaagaatattgtatgggtccgtccggtgatagccgatcaggaggctgtccgtgtccatatcggactttatgaagaagaggacggacagattcaatacagaatgtacgggggtaacgattctatcggtgaagaagctcctctttataatcagggcatcgctgaaatcatccggaaggaaccggaggaagcggtggatattgagcagctgaagcgccggtgcacgcagggaacaatcgaatctcaagcgttttacaaaggaatgatcggcgctgattacgggcccggatacaaaggggtgcagcttgtatacaaaggcgaagaccggctgcttgctaaattgaagcttcctgaatccgtctctcatacaaaagctgattatatccttcatccgagtatgatggacggtgcgcttcaggccgccgaatatttgcaaaacgtgacgagagcgctgcttgcagaaagcggggaaccattcaaagccgcattgccgtttgctttagaggagctggacgttctgaatccgtgcgctgatgatatgtgggtgcacgtcacattcagtgcgaacaataaagccggcgatcctatccaaaaagccgatattgatctatatgacaataacggctggctttgtgtgcggatgagaggtttctcaacacggatcatggaagaaaacgcgggtgccagcgtttcggtcagccgtacggacacattgctcgctgaaccgatctggaaagagcagacggaaccggcggaccacgagccaacgtatgaagagcatattattttcctttgtgagtacgatgaagccgtaaaacaggccgtggaagcaaagcttgaacatgcaagcgtcattatcttggacgatcgtcccgcatctattgcagagcggtatcattcttatgcgggccagctgtttgaccatatcaaaaccataatgaaaagcaagccgaagggcagcgttctttttcaggctgttacgcggtcagcaggcttacagcaggtgttctcaggcattaccggcctcttaaaaaccgcatgccttgaacattccaagctgatctgtcaaatgatcgaagccgaagagaaagaaagtgctgaaggcatagcggaaaaagcgttcgaaaaccgtatgcatgccgaaagcgtccatgtgaaatatgaaaacggcaagcgctttgccgctgattggggagagatggatatttctcaagcggagccggacattccgtggaaagacgaaggtgtttatctcattacaggaggtgccggaggtttaggtctgatctttgcaaaagagatcgcaaaccgtacaaaagacgccgtcatcatactaaccggccgatccgttctcagagaaaagcagaaagacatgctggaaacagtacgtgctgccggcgcttctgttttctatgagcagaccgatgtcacggacgaagcagaagtataccgattgatccgcaatatccgcaaacggcatggcaagctggacgggattgttcacagtgccggcattataaaagacaactacatggtgaagaagacggcagaggaataccaacacgttctcgctccgaaagtgaagggccttgtgtatcttgatgaagcgtcacaacatgagaaattagatgtctttattgtcttttcatccttatcaggtgtgcttggaagcgtcggccaggctgattatgcgtctgcaaatgtctttatggagatgtatgccgagtaccgccgttctttacaagccgcaggacaaagatacggaaagacgctttctgtcagctggccgttatggaaagaaggcggaatgcaggcaggaaagcagacggaagatatgctgatgcaggaggcgggaatcgcaccgctcggcacagatgccggcatcaaggctttatatcaaggcttgatgagcgggacagcccggatgacggttgttgaaggagatgtgaaacacatgaaagcaaaactgttccgcaaagagaatgatcatccggaagcagagaccggcgtacgtcatgacattgatgctgacagcctgcttgaaaaagtgaagcatctgttaaaacagcagacggcctcactgttaaaagtaaacattgacaaaattgatcctcatgaagaaatgacaaaatacgggctggattctatctcgatgactgagtttacgaaccagttaaacaaaacgtaccggcttacgttaacgccgacgattttctttgatcatccgacaatccatgaatttgccgttcatttaatcagtgaatacgaagaggaatttgccggacggtttgcggtaaatacaaaaacggttcaatcggcaagaccggtaaaagagactcaaatcacgcgccctgccgttaagcgacgccgcactctgcctgagacacttccgcagacagtgcagcggggccaagggccggaaccgatcgcaatcgtaggcatcagcgggattttcccgatggcagaagacattgaagctttctggcagaacctgaaagaaggcaaagactgcatgaccgagattccgaaagaccgctgggactggcgggactattacggggatcccgcaaaagaagccaataaaacaaacgtcaaccaaggcgggtttattgacggaattgctgaatttgatccattatttttcgggatttcaccccgggaagcggagcaaatggaccctcagcagcgcctcttgctgacgtacgcgtggaaagcgatcgaagatgccgggtatgcgtcaaagagtctctcaggcacaaaaacaggtgtgtttatcgggaccggaaataccggctacggttcgcttttagccaagaccgatgcggcgattgaagggtcatccgcggcgaatacaagtccgtctgtcggaccgaaccgtgtcagctatacgctcaatctgcacgggccgagcgaaccgattgataccgcctgctcaagctcgctcgttgccatacaccatgccgtttcttcaattgaagaaggaacgtgcgacatggctttggcgggaggaatcaatacgattgttcttccggatgtgtatatcagctttgataaagcgggcgcgctgagtaaagaaggaagatgcaaaacgttctctgatcaggctgacggttttgcccatggtgaaggagccggtctctttttcctcaaaaagctgaaagccgctgaggcggatggggaccatatttacggcgtcattaaaggaagcgcggtgaatcacggcggccgcgcggcatctttaacaacgcctaacccgaaacaacaggcggaagtcattaaagccgcatacaaaaaagcgggcattgatccgaaaacagtctcttatatcgaagcgcacggcaccggaacagaactgggagatcccgttgaaattaacggcctgaaacaagcgttcagctcgtttgcagacggaaaagagaaagcggccggctattgcggcttagggtcggtcaaaacgaatatcggccatttatcccttgccgcgggagcagcgggcattattaaaattttgctgcagatgaagcatcggacactagtaaaaagtctccactgtgagacggtaaatccgtacattcagcttgaagacagcccgttttatctggtgcgggagacaatggaatggaagacgcagacggacgaacgcggaaacgaacagcctcgccgcgcgggcatcagctcattcggcatcggaggcgtaaatgcccacgtcgtcatcgaagaatacattccagaagacagagaggaagcagatgattttcatatcgacccatgtcttttcgttctgtccgccaaaaatgaaaaacgcctgaaagagcaggcaaaacagctgaaacgtgcgcttactgaaaaacggtacgatcaatcctccctcgtttctatggcatataccctccaaatcggaagggacgccatggaagaacgtctggcggttattgccggatctgcagaagaactgcaggaaaaactgtcacagtttatcactggagataagcacgcggacttgtacagaggaagaatagacaaaggcacgctgcaaatgctgacggaagatgaagaaattcaagaagccgttgaaaaatggatggcacgcggcaaatacgcgaagctgcttgaattatgggtcaaagggctgaacgtcgattgggcgaagctgtatggagaccggccgcctaaacgcatgagcctgccatcgtatccttttgcaaaagaccgctattgggcggcaaaaagcaccggaaaacacgaaaaaacaagcactgtatctgccggaaaacaagacgcgcttcatccgcttctgcacagaaatacttcaaaccttgcagaacagcggttcagttcaatctatacaggaaaagaattttaccttgcggaccatgttgtaaaaggcgtaccgattttaccgggagtggcacatcttgaaatggcgcgcgcagcaatggaacaggcatctgaagttccggccggacaaggaagcgtcaagcttaagaatacggtttgggtgcggccgatcaccattgaagacgagccggttcatgtcaacatccgtctcattcctgaaacggcaaatgacgttcaattcgacatttacagcggccgggaaacaggtcagccgtccgtttacagccaaggggcagtatcagtccgccctgacgccgaggctccggtcattgatctccaaaagctgagatcacaatccgccgagacaccgttttctgcagatgaagtgtacgatatgtaccgcaaaatcggttttgattacggcccggctttccggggtgtcaaagcgatttatacaggtggtgatttcgtattgggcagactgtcacttgatgcggcttgtgcggacacggtacaggagtatgtcatgcatccgggcttaatggactctgcattgcaggcatcaagcatattaaccggaacaaatgatgaaaaactgatgcttccgtttgcggttcaggagcttgaagtattcagcgcatgcgctgccgagatgtgggtttacgccagactttctgaagaccacaaagccggccaggttgaaaaacgcgatcttgatatttgtgatgaaaacggcaaggtttgcgtaaggctgaaaggtttgtcattcagaatggctgaaaaagaacctgagaaaaaagaaaaagctccgggaacgctcatgcttgagccggtatggacccgaagcgatgaaactgctactcaaacggaaccggtttttgcccggcatatcgtaatactttgtgacacagacgccggattaaaacaagccgttgaagccgcgggagctgaatgtattgaaatgacctcccagcacgggaaagcggcggcgcgcttccgtgattatacaggacggatattggagacgctgcaaaaactgctgaaggaagagacggatggagacgtcctcatccagacggttctctctaaaacagataagcatcagctgctctcaggcatttcagctttgttaaaaacagccggcctggaacataaaaaactgaaaacccagctgattgaaatagaaccggcggaaaacggcagaatcacagacatcatcagagaaaataaaacacgggctgatgacagccatatcaaatatgaaaacggcatccgatacagcgcagatgtcagagaaacggccgtgtccggcggcaaaatacgcattccgtggaacgacggaggcatatatctcattaccggaggagccgggggcttaggctttattttcgcgaaagaaatcgcccgcaaagtcaaagagccgacactggttttgacaggccgttccgcattaagcgagaatcagcggatgcagctgcaatcgcttgaatcactcggagcaaaagcggaatacaagcaggctgacgtaacaaacgctcaaactgcggcagacctggtcaaaacaattgagacggaatatggcggccttcacggcatcattcatagcgcgggtgtgatgaaagatcagtatatcgcaaagaaaacaaccgaagagttttacagtgtattggctcctaaaacggacggatttgtcaaccttgatgaagcaaccgagcatttagcgctggactttttcatcgttttctcatccatttccggcgtcaccgggaatgcgggacaggcggattatgcggcggcaaacgcatttatggacagctatgcggcataccgcaacgcactggttaccgcaatgtaccgccacggtcacacattgtcggtcaattggccgctttggaaaaacggcggaatgcaagtcaatgaagaaatggcgaagctcaccgaaaaaagaaccggcgtaacgccgatgcgcactgagaccggaatagaagctctttacaaagcatggagcatggggaaaacaagcgtgctcgtcatggaaggaaaccgcgccgtaatgcgggaaaagctgcttcaaaagactcctgcagccgcttttgcaccggttaagaaaacagatgaaacgcctgcgccgaaagacctgacggcaaaacttcaggaattgctggcaaaagaggtttccgggcttctgaaaataaacattgaagaaatcgatatcgaattggagtttaatcaatacggatttgattccattacgctgacggaattcgccaacaagctgaatgacacttatcagcttgatctgacaccgaccgtattttttgaatatgcgacgattcaagccttggcgcatcatttagcagaagactatcaaacacaatttgccggcagcacacagccgaaagaagaaaaacaaagcggtgtaacagatgatggcggcatcagactggcagggaacaaacgatttgcaaaaactgccgtacagcctgttcagacggcggctgaatataaaccggaaccgatcgccattgtcggcatgagcggagtgtttccgaaggccgcaaatattgatgagtattggcgcaacttagaagaaggaaaagactgtataacagaggtgccggcggatcgctgggactggcgtgagtattacggtgacccgcttaatgaagccaacaaaacaaatgtaaagtggggcggatttattgacggagttgcggattttgatccgctgttcttcggaatttcaccgctggaagccgaacagatggatccccagcagcgcttgttaatgatgtatgcgtggaaggcgatagaagatgcgggatattccgctaaaagcctttccggcacgaaaacaggcctgtatatcggcacggggaataccggatacggctcactgttttccgacctggatatcggcggtgcgtcagccgcgaatatgagtccgtcagcggggccgaaccgcgtcagctatatgcttaatctgcacgggccgagtgaaccgatcgacacggcttgttccagctcgctggtcgcgattcatcacgccgtatgcgccattgaaaacgggaactgcgatatggcgatcgccggcggcgtgaataccgtcgtcactccgcaaggccacatcgcttatgacaaagccggcgctctgagcaaagaagggaaatgtaaaacattctccgacagggcggacggatttgccgtcagtgaaggtgccggaattctgtttttgaaaaagctgtcagaagcggaaaaagcgggcgatcatatctacggcgtcattaaaggcagcgcggtcaaccacggcggacgcgcgaactccttgacgacaccgaacccgaaagcccagtcggaagtcgtccgaacggcttatgacaaagcaggcattgatccgagaacagtcacttatattgaagcacacggaaccggaacggagcttggcgatccggtcgaaatcaacggcctgaaatccgcctttcaaaagctgtacgaaaaaacaggcgattccgccgtttacgcgagtcactgcggtctgggttcggccaaaaccaatatcggccacctgtcactggcagccggtgtcgcgggtgtgatcaaagtgctgatgcagatgaagcataaaacacttgcaaaaagcctccacagcgaggtcatcaacccgtatatcaagctgaaagacagtccgttttacatcgtacaggaaaaaagagaatggacagcattgaaagacgaaaacggcaatcatctgccgcgccgtgcgggaatcagttctttcggcatcggcggcgtaaacgcccatgtcgtcattgaagaatatatcccgaaggaagaaagaaaaacagctgttttcacacaccctcaaatctttgtgctgtcggccaaagaagaagagcgtctgcaggaacaggcgcagcagctggcgcaagcttcttttacggatgcggatcttgccgatgttgcttacacgcttcagcaggggcgtgatgccatggaagaaagagcggccattatcgcttcctcggccgaagaactgcgggacaagctaaagagctgtgcgaaaggacgttatgatatagcgggcatttataaaggaaaagcgggtaaaacctccctgaaatccattctggcaggtgcaaacggcgaggcggatatcgaagagctgataagccgccgagagaatgacaagcttgcggaattatgggtgcagggcgcggatatcaaatgggacggcctatattctgatatcaagcctcaacggatgagtcttcctgcttacccgtttgcgaaagagcggtactggatcacggacaatcggccgaaagcagagaaaccgcaagctgtgccgacgtcgcgggtgctgcacccgctgcttcacgaaaatgtatcagatttaacagagcagcggtaccgatccgaatttacgggacaagagacgattttcaccgatcatcttattaagggcaagccggttatgccgggcgttgcctacttggaaatggctagggcggcggttgctcaggcagtcaaagggcaaaaggaacgtccatctgtcacccgcctgaaaaacatcgtttgggttcggccgatcgaagcgggaaaccgcccgattgaagcgcaaatcagcctgaacccgagggaaaacggtgaaatcgtgtatgacgtttacacggattcacaaacagaagcaagcggcaggcagatacactgtcagggggctgccggcattctcagcgccggggaggctccgcaccgtgatataggcgcactgaaagctcaatgcggcctcagtatactgacttctgaacagtgttacggcttattcagcaaaatcggcattgactacggtcccggacaacaaggaattcagcagattcatatcggaagcaatcaagcattggctgagctccggctgccttccttcctcgaagaaacggcagatcaatacgttcttcacccgtgtatgcttgattcagctttacaagcgacaatcggtctgaagctgcacgcagatgataaccagctgtcactgccgttcgcccttgaagaactggacattttcagcccgtgcacgacaagcatgtgggcgtatgtcagctcccggggaacggatgaaaaaatacagcgtatggacattgacttatgcgatgagacaggccgggtctgtgtcagaattaaagggatttcttccagaatgatggaaggccccgcgccggaaacatcattaaatggagcaaaccttctggctccggtgtgggatctcgcggaattccgtgatcaaagcccggcatataagacggaagaggttgtctttatcgcgggggatgaggaaagcgcggcttttcaattgcatcatccttctgcgaaacggcttcatatcaccccggaggatgaaatagaggctgttgcggctgaactgaaagcaacagggtctttcgggcatatcgtatggatcgctccttttcacagcgctgatgacatggtaaaagctcaggatgcgggcgtcatccagatgtacagagtgattaaggccatgcttgctttaggatatggaggcaagcgaatcagcttgactgcagtcacaataaaaacacagtccgtacagccggcggacattattgatccggctcatgcaggcattcacggtttggtcggctcgctcgcaaaagagtatccgaactggcaaacaaggctgattgatgccggctgtccggaagacgtttcaaaggcggagctgttctcagcgccgtttgatgagcaaggcaatacatgggcgtaccggaacaatcactggtacaaacagcgccttattcctgtacagcagccggtgtcaagccggcccgcctaccaaaaaggcggcgtttatgtcgtcatcggcggcgcggggggcatcggcgaggcatggagcgaatatgccgtgaaaacatatcaggcgcgagtcgtttggatcggcagacgaaaacataacagcgccatccaggaaaaaatcgacagactcagccaattcggcccggcgccgatttatattgaagctgacgcggcaaatccgaatgagctcacacgggcgtatgaaacgatcaaacgcacgcacccgcaaattaacggaattatccattccgcaattgttttagaggatcagagcctggcaaatatgccggaaagccgtttgaaaagcgtgctcgctgcgaaagtcaatgtcagcgtgaatatggcccgcgtgttccaaaatgagccgctggactttgctttgttcttctcatctgttcaatcatttgcacgagcggccggacaaagcaattatgctgccggatgcagtttcaaagatgcctttgccgctcatttggctcaagttcggccgtattcggcggcagtgatgaattggagctactggggcagtgtcggaatcgtatcatctgccgactatcaagaacggatgaaacaggcgggagtcggatcaattgaagcgccggaagcaatggcggcgcttgaacgattgctcggcggcccgttgaatcagttcgtcatgatgaaacaggcggaagagccggaggaaaaaccggaagaaatgatagaagtataccctgaacatcacggctcggcgatgcaaaaactgcgaagctatcagcctaaagtaacaagacatgtacaacaattgagttaaggaggggacggctttgcaaaacactgaagatcttctttacaaactattggcaggccagctgaaatctgtcggattttttacggaaaacgaaacgcagcctgtcatgcaggggttttacggcaggtggctggaagaaagcatctccatcttggtgcaaaaaggctttttgaaacagtcaggcagtacgtatgtgttaacgggtccgatagagcgtgcggacgttctgtggcaagaatgggatgaaaagaaagctcctttactcaaggacagcagcaaacaggcgatgatcaccttagtggagaccgctctcagagctttgccggatattttatccggcagagtttctgccactgatgttctgtttcctgattcctcaatggaattggtggaaggaatctataaaaacaatgaaacggcagactactttaatgaggtgctcgctgacacattgacggctttcattgaagaacgcctgaaagaagacccgaacgcggaaatccggatattagagatcggagcggggacgggcgggacgagcgcggccgttttcaaaagattaaaagagtacaaacatcatgtgaaagaatattgctacaccgatctgtcaaaggcctttttcatgcatgctgaaaaagaatacggtcccgacaatccgtatttgacttataagcggtttaatgtggaagagcccccggctttgcagggtatagaggcgggcgcatatgacgcggtaattgcggcaaatgtgcttcacgcgacaaaaaatattcggcggacacttcgcaatgccaaagtggtgcttaaaaagaatgggattttgttattaaatgagattagcagccattcggtttattctcatctgacattcggtcttttggaaggctggtggctgtatgaagacgccaaactgcgcattcccggatgcccggggctgtatcctgaagcgtggcagtctgcgctggaaagcgagggatatcggtacgttacatttatggcggaatcgtcacatcacctcggccagcagatcgtggcggcagaaagcgacggcgtcatcaggcaaaagcagccggacgcgcaggcggttgaagaaactgcggcttccaaagagcaggctgatttcacagaaccgtctttctcagtcacagaccggactgtgcaattcataaaagaaacgttagccaagtccataaagcttgctcccgagcgcattcagccggaaaccagctttgaaaaatacggcatcgactccattttgcaggtgaattttatccgtgaactggaaacattgacgggcgagctgccgaaaacggtcttatttgaacacacgaatacgaaagaacttgccgagtatttgctggaaacttacccggataagctgcaacaggcattcggagccgaacaagcgcctcctgaaacaaagcatccggaacctgcaatgaatgaaccggtgccgcttgtcacggaaacgcggcggtttatcactgaacaaaaagagccaaaagcgccaaagccggaaacagaaaccgtcaccgttaatcgttctgatcgtgacgacattgccattattggcatcagcggccgctatcccgagtctgaaaccctcgatgagctgtgggagcatttaaaagccggagacagctgtattacgaaagctccggaaaacagatggaagtccggtcttctgaaaacgatggcaaaagaaacacgaaaagaagaacacaaaacacggtacggcggatttctgcagcatattgacgcttttgaccatcacttgtttgacatccgggaagaccatgtgatggagatgacgcctgagctccgtctaagcttagaaaccgtatgggaaacatttgaaaacggaggctactcgttagaaagagtaaacgaatggcaggaatcagacagcggcatcggtgtatttatgggcagtatgtacaatcaatatttctggaatatcccgtcattggaaaaagctgcgctcagctctaacggaggggattggcatatcgccaaccgcatttcccactttttcaatttaacgggcccgagcatgggcgttacgaccgcatgctccagctcactgagcgccattcatctcgcctgtgaaagcctgaagcttaacagctgttccatggcgattgccggaggggtcaatctcacgcttgaaccgtctaaatatgatgcgctcgaacgggcgaatttgcttgaacagggaagtgaaagcaaaagcttcggaaccggcacgggcctgatgccgggagaaggagtcggggcggtgctcttgaagccgctctccaaagcgcttgccgacaaagaccatatttacggggtcattaaaagcagcgcgttgtgccatagcggcggaaggcagatgtacacggctccggatccgaaacagcaggcgaagctcatggcggcttccatcgacaaggccggaatcaatccggaaacaatcagttatgttgaatcagcggcaaacggctctgtattgggagatccgattgaggtcattgccctgacaaatgcgttcgcgcaatatactgataaaaaacgtttttgcgcgcttggatccgtcaagtcaaatctcggtcatttagaggcggcttccggcatgtcccagctcgcgaaagtgctgctgcaaatggagcgggaaacattagtcccgacgattaacgcaaaaccgcaaaatccgaatatcaaccttgaacaaacggcttttcacctgcaggaaaaaaccgagtattgggagcgtatgagggatgccgaaacgggggacatcatcccgcggagaagcatgattaattccttcggggcaggcggggcatatgcaaatctcatcgtagaagaatatatcagcccgaattccgatcaggcccgtcacggcgatgaggaatatattttccctgtgtcagcgaaaacaaaatggagttttgaagcctatcttgacagactggcggcctttttagaaaagacgccatctcttcatccggccgccatcgcatccgcgctgcaaaaaagaacgcatcattcggagtatcgggcggcatttacggctgcttccgttcaggaactgctggaaaagctggccgcttaccgcatggatcagcggaatctcaatttctctgaatctgatattggccggcgtgcgcggcaatgggaaaaaggagagaatatcgcgtttgatcagttgcagcaagagcacgccgttcatctgccggcctacgcttttgaccacgggacttcttttcaattcagtgaatcagaaaacgctgccggcgttcaggcggtatacagtgatgacgatccatacgtgaaagggcatcaattcagcggagaaccggtactcgtcggcgctacatataacagtctggcagtcgatcatttttgtgatctttttcctgaagcggaaggaggacaaattaaaaaactgaattacgtcagccccattaccgtaaaaaaaggcgatcgcatcgagctgaaaacagaatcgaaacaaaacggggatggatttgaactgagcataatgcaccgcagccgcacgtctcctgattggagcatagcggcgtatgccgagtgcagcccctatccgtttcaaaagcagcacgcggatctggcggccattcagcgctcttaccgggaagtgggccggatagatgagttatacggagacggaacgggacccgtcgtgtggggagaagaatttaaaacgattacccgcctgtacaaaggctctgatgccgttttagcgaaagtgaacctgaacaatagcgactcacaacaagcgcatcattatgccgtaaatccgttcatcgccaacagtgcttacttggcctcactttctttattggatcaaacggaggcggaaagctatctgccgttcggcattaattccgtcaccttcagcagccctgaagatcttatcgattgctggctgcacatcaagctgaccaaacaaacgggggaaatgattctgattaacgcagatgtcatcagcagccgatcggaagtggtgatgcgttttgaaggctatgccctgaaacggttccgtccgaaaaccgaacagatgaatcagccggcccgaacggctgttaagaatgcgggagcaccgatttctgccggcagtctgacagatgatatccgcagctacgtccttggcaagctcgccaagatgatggatgaacccgggccatctcttcgttctgacgcgaatatcatggaattgggacttgattcagcaagcctgatcgggctgacaaaagagatcggccaagaggcggacatcgatgtgaatccaacattgtttttcgagtatccgaccgcggaggagctgacccgccacttcgcgtcagcatatgagagcaagttttctcaattgcttgccgatcataagcattcagaagaggccagggtcacggaaacagaagagcgcactttaccgaggaaacagcatacgccttgtgataacgccgatgtcaagcaaggaatcgcgattatcggtatgtcagctcagtttccgcaatccccggatatccagtctttttgggagcacatcgtaaacggggatcactgtattaccgaaattccggcggaccgctgggactggcgccgttacgccggtgatgagaatgacacgagtctcagatggggcggttttattgacggtgtcggcgaatttgacccgctctttttcggaatttcccctaaagaggcatcacaaatggggccggagcagtttctgcttttgatgcatacatggaaagcaatggaggatgcgggcctgacaaataaggcgttatcaagcagaccgacaggcgttttcgttgccgcgggcaacagcgatccgaacaatggaacagccatcccgtccatcattccgaacagaatatcatatgccttgaatttacaaggaccgagtgaatattacgaggctgcctgcacgtcaaccctggtggcattgcacagggcggttcaatcaatccgtcataacgaatgtgagcaggctgtcgtgggcgccgccaatattctgcagtcgccgaagggctttatcggttttgactcaatgggatatttaagcaaaaacggccgggcgaaatcgttccaaaaagatgccgatggctttgtcagaagcgaaggggcgggcgttatcatcatcaaaccgcttgaggcggcaattgaagacggcgatcatattcacatggtcattaaaggaacaggagtgtctcacggcggtaaaggcatgtcgcttcacgcaccgaatccggcgggaatgaaggccgcgatgaaaaaagcgtacgaagacaccgatgttgatccgcaaactgtcacttatattgaagcgcacggcattgcctccgaaatggcagatgcgctggagtttaatgcaatcaaagcgggttacggcgagtctgcaaatcaagaggaaagcgcgccttgttatatcagcaccgtgaaaccttgcatcgggcacggcgaactcgcttccggactggccgcccttataaaagtggcgatggccatgaagcatcataccatcccgggtattcccggatttacagctgcaaatgagcaaatggccattcagaaaagccgcttccgtttcaccgaagacaatcaggaatggacacagctcaccgaccatacgggcagaccgatcccgcgccgggccgcaattaacagctatggcttcggcggcatgaatgcgcatgtcgtcttggaacagtacagcccgagccataaagacaaagaatctgtgcatgaaccgcagcttatcgtgctttctgctaagagcgaagggcgtcttaaggcggtcgcaagtcagctggatgattttgtgcaaactggagatactctgtcattgcgggatattgcttatacgcttcagaccggccgtgaggcgatgaactgccgcctggcactcgttgcccgcaatcaagatgaattgctggaaaaactgaaagagtacagagcattttccgaagaaagcaatggaatgaaaagcttctttacaggcagtcagcagactggatcaggagatatcggcgttttactggaagggactctcggtacagtcgtcacggagacgctgttggctgaaaacaatctcgaaaaacttgcattttgctgggtgaaaggtgcggatataccgtgggacagactccaccaaggcaaatctgttcaaagagtgccgcttccgacatatccttttgaaaaccataagtattggaacggcggtcagccagaagacatcagccttgcaccggtttcacagaatcctcagatccgctgcgagagcgcggctgacattgtggcagacattttggggatgaaggcagcggaaattgatcaaaataagccgctgactgaatacggcttcgattcaatctcctctattcagctgttgaagaaacttgaggacggagacagccgcatcagtctggaggctcttcagaaatgcagcactcttcaggagatctgcatgctgttaaaaacgaaccaaccgcaggagacgggccggaattttcccgaactcgtcaagctgaatgaaagagaaaaaggccgtcctgttttttggtttcacggcggaacgggaggcgtggaagcataccagccattcgccaaaaagagtcagcgacctttttacggcatccaggcaagaggtttgacagggaaagagccgctgcaaggaatcgaagagacggccgcttcttatatgagaatcatccaagcggtacagccgaaaggcccttatgacctcggcggatattccttgggcggcatgcttgcatatgaaaccgcgcgcctcttgcaggaggaaggtcatacggtaaaaagcgccgtcatgatcgacaccccgtacagtgaaaaatggaaagaaagaaaaccatctgttaagtcagtcatgctgcaaacgatcaatacgatgcttacagcatatcttaagcctgaaaaccttgaagaggcattaatcagcagagaagacattaccgtccaggctgaggaagaagaagtattgaaagaattgatcggccttgccaaaaagcgcggtctgccaaaatccgaagaagcgatccggatgcagctggagcaaatgatgaagacgcagctcgcttacggaatggaagagtatgacatgaagccgctgcctcatccggaagcgctgcaatgctactacttccgtaataaaagcggtttgttcctcggacatcttgaacgttatctgacagcagaggaagaacaaattccgttagaccatgatgcgtattggaaagaatgggaacgccagatgaaacagtttcacctgttggacgttcactcttccaatcatgtcacaatgctgtcggaaccaaagccgcaaaacgccattaaagcattctgcgaaaaactgtacgcaaacaaaggaacgataagcgcaaatttccttaaatctttcagaaaaaagctggacgaaacaaatgagttggtaaaacggtaatagagaacggccggagcaatccggccgctttttttatccatatagaactaaatttactatgtactaaattttcattgtcgtattgatttctgtttataagacattaaaaaaacccccgataaacagggggggagatgttaaaatctgacaggaaatgtttcaagccctctcaaaaacacattttttctccatgttacatcctcgggcgcgcctttcagctctatattcggaaaccgttttaaaagcgcagtaaaggcaatggatgcttccatccgggcgagcggagccccgagacaaaaatgaatgccgaatccaaaagagatatgacggttcggtgttctcgctatatttaatgtatcaggatcatcgaaatattccgggtcccgattggctgaaccgatgccgataaatatcatatcgccttttttaatggaaacatctttataggtgaaatcttcaatcgcccatcgatttgccatcatgatgacgggagaggtataacgcaaaagctcttcgaccgccgtctggatattttccggctgccgctttatcttctccatctggtctttgtgcagaagaagcgccagggtgccggagccgagaaggttaaccgttgtttcaagcccggcaacgactaacaaaaacagcatggaatacagctctgattcactcagcttttggccgtcctcttcagcgtaaataagcttgcttgtcaggtcttcacccggatgttttcttttttcttcgatcagtgttttcatatattgtttaaattctttgagagcctggttggtcgcatcttgtccgctttctgacgtgtcgaccattgcgtttgtccacacttgaaatttggcgcggtcctctttcggaatcccgagcagttcggaaatgacgataaacggaagcggtgcggcgaaatctctcatgatatcagggtctgcttttgtttccatttcatccagcagctcttctgtgatctgctctatcccggtgcgaagctgctcaatcatccggggagtgaacccctgatgcaccaaagatcgaagtcgtgaatgatccggagggtcttttgccagcatatgctctgagacaaaatcgatatcttcactgacattcagcttcgcgatcagctccttcggcatgactcgttttacatctctcgtaattctgccgtctttcaaaaacgccatacaatcatcataacgcgtgatgagccaagccggaaaggtgcctccgaaacgctgcagttcgaatttatgtatggggtcctgctctctgaatctgcttaaaaccgcaaaagggttttcgtgaaactcgggtgagtgtgggtgaaacattgttttttccatctggatttccccgccttcatgtttttgaaaagacataacaaacagccggtgcctgccgaccggacggcattcctccttttatctgccgaagacactgatcacaacggctcataagtatgtctaaaatatataaggaaacagaagccggttcaatagacaaatcgtaaagccgccattttcgttgattatcaacaaaacagcaaactttttttgccatttcatcatgtgtgttaaatccggctaatatacatatttacgcttcatatcaacttcttaaggaggatgtgaatgaatgcgtttatgaaatgggcggcaagtctgcttttggtgatctctcttcagttcggccttacgggcgccggcatccattcggacagtgctgctcgtgccgcatcccgatacgatcaggtgctgtatttcccgctgtcaaaatatccggagacgggaaatcatataaaagacgccatttcggcaggtcattctgagatttgtacaattgatcggggcggagcggagaatagaaggaaagaatcattgaaaggaattccgacaaagcccgggtttgaccgtgatgaatggcccatggcagtctgcacagaaggcggggcgggggctgatatcagatatgtaaccccgtcggataaccgcggagccggttcatgggttggaaatcaaatgagcggatattccgacggcacgagagtattatttatcgttcagtagcttctccggttcgccggagtttttttatgctctgaaaaagcggcacgccggctggacatatgaaatggcaaagagtaaacttatatgttggaatcagcatgagaaaggattggatcacattgacagtgactacataccgaaatattgcacttttacttctttgtttaacagcgggaattgtggatgtgatcggttatttaagcctgggacatatctttaccgccaatatgacggggaacatcgttctgttcggcctggcgatcggcaactcgtggcaccttgccgtactcaaatcgttaacctcgttaatcggatttattgccggcgttattgccgcggccctgcttgtgggcaataaaaagaaatcattctggccccctgcggtaactgccgctttagctattgaaggagctgttttgctgctgtttgctttgttctcctgcttttttgcagatgccatttctgtttatgtgctgattatgctgctcagcttcgcaatgggaatgcagacgacagccgcgagaaaacttggtgtagcggggatttccacgaccgtattaacgggaacgctcgctaatttttttgaagatctcaccgcaaggttttacaaagcggacaagcggaagcagtttacgagagatgctgtattgcgcgcgcttgccttggtgctgtattgctttggagcggtcatcggcgcttttgccgaaccggattataagtttgccgtgatctggcttccgattatcattattttaggcattatgctttgcgcattcacgatgttccacggatattcagaagaaaaaaaccaataaaaaaacgccgctgattcagggcgttttttctttttattgctctttccgggtcccgattgtataaacggcccgatctgtatgtacctttaatccgtcttgctccttttggatggtgatgtcgccgagcagagggatttcatacgcatcttggggaagcgggacatttccttcctccgtataggttgtgccgtgcccttttaagacgagttcttcgtccgctacatagtcatcgggatggtttgtccggcggacgagaacatcatcaaggtgaagcatgatctgatccatatcagaaatctcgtttcggctgtctgtcagctctcctttcctgatatcaagcgtttgtccgatctgtttttgcagccattcagacaattcggtgtttgtaagtgccattgtgattcctccttttatctacaccatacttattccctatttttttagaaatacactgccttgcattgatctttttttctgacagccggttctggagcattccgagttccttcattataaatgtttcatctgttcacctaaaaaacggggtcatctgcaggtttagacgaccccgttctcatgataaaaaggttactctttcggcacggcgttttcagcgtttactgcgcccgctccgtaaatgttcggatcttcatttgtccacttatccggactttgtttgatcagtgttttcacttcgtcaggcgaaagctgcgggttctgctgaaggattaaggcggcaatgcccgcacagatcggagtggccatggacgtgcccgacagactgaaatacaaggagcctacacggtttgatttctgtaatttgtcaaggtatgaacgcggagaacggagagatacgatatcgaccccgggcgcaagaatgtcaggcttctcttttccgtacaccgtcgggccgcggcttgagaaagaagcgaccgtatcgtcctcattgccggccgtatcattgtcatcataggcgcctaccgtgatgaccttctcgctgacaccggggcttgaaatcgtttgagcttccggaccggagttgcccgcggcgacgcagacgacgattccttcattccatgcctcttcaacggccttgacgagcgggtcgtccgtttctttatcatatctgagcgcatctccgcccagtgacatgctgatgattctgatcggattctttgtgtgttctttattatattgtatgcaccattccacaccttcaatgatatcagccaaggttcctgatcctgatttgtttaataccttgactccgatcagatcggcttccggcgccggcccctgatatttaccggaagatgaagcgccgctgcttgcgatatcaccggcgcaatgggtgccgtgtccgttgtcatcatacggttctgtcttttggttgacaaagtccgcaaatccgataactctgccttctaaatcgggatgctgatagattccggtatcaataacggcgacggttacgccttttcctgttaatacggtgccgttacgggtcacttcttttgcatgagacgattcagctgccgtatcaaggaacgcttttacttcacggtttaaatagattttacggatatcccggcattgcgaaagaagcatgtgaagggcggacggagtgacttcggcgctagcaattgattgtttgaaactgcttttttatggtgcagcgtttttcttttgataagacctgtcctgtgctgtgaaaaccggattcatggcagccctcttcaaattcaatgatgactgacattttctttctgtttttcacctttttttcgaaaaacttgtgcaaaaagcaaggtgtccatttgaaaggtttatataactgtaatacgttttctctgagcggccagtccagcttatgagcatttgaccgcaccatttgtaccattgagtaaccaaacatatatacttttcctcccattctggcgattctctctataccatatgaacaggccgtatgttcggtcagtttgtttgtccttcaggagcgctggttacttgcggctttttcaggagaagaaatcgagttgaaacggaacgtttgttcgtttatagtgaagccggcggaaggaggtatatatatgaacataatattgagacattccttggaaaaacagcttccgattgatattatatatatgaaaaaagacggctccatttcaaaacggaccattatgataaaaaaaggggatgagcgggctgtaacggcattttgctgtacaaaaaggcagatgagaacttttttgacgggctccattctgtcctgtgcatttgcttcgggaggcggatattcatttttaaaagcgtattcctgatgccgtccgtttccggccgtgaatctcccgcccctgaaaattcgggcgttcctccctttttttttgccctctctcaaccttttttcactgatgcccggcatttgagcgcttgaaccgtgacaatccattgatttttcgaaaccgggaagtttttcactgatgataatgttaatagaatgttaagataagacctattgacaaaaatccatataatgaacatgtcatttttcagaaaggagcaaagaaggagagctgatgaaaagaattttacttaatgtcatcattatcgtagcaatggtcttactaataagatgtgctcattatgcgtcagaccctgatccctcgaattcttctgatacatacacagattttaaagatttggctgaacatgaagaccccgatgattatcatatatcgtacaataagcgaaaggggagccccgtattgatcatgtcgccgcacggagggagaattgagggcggggtgagcgagatcgtccgctctttcagagatgattattcaacctatctgtttgagggattaaaaacgcatgataaccagactcttcatattacgagcaccaggttcgatgagccttcagcagtcgaaagcattaagcagcaccattatgttatcgcagttcacggttataaaggcgacgagaaaaatactcttgtcggaggaagcgaccggaagcgggcgaaaaaattggtgagagctctcgaacgaaacggattttctgcagaattggcaacctcaaaaaccggtctggccggggttgacaccgaaaatatcaataaccaggcgcaaaccgggctgagcatacagcttgagatcagcagagaacagcgggaagcgttttttgataattttgattaccgcgaaagggaattcacaaaaacggaggaattttaccggtttgtccgtacgataaaaagagtgatcaatcaagagtattcgtaagcttaaaaaaagacaaacgagtgaaagatgagtaaactgaaaaaaaggaggtttgtcccttggcaaaacatcacttttatttaaaagcaaattggcccggaaatcgcaatgacgtcggcgatattaaaagcggccggctggaaacggctgtgtccattcctaaggaaatggacggacccggagaaggcacaaatcctgatgaaatgctgcttggagcggccgcgacctgttatattataacgcttgcggcgatgatggaaagaagcggcttggataaagaagatctacatatggaatctgaaggaattgtagacgtcacaaacggtgtgttcacgtaccagaaaatcattcaccgcccgtttatattattaaagccggatgcagccgaaacggactttatgctcgccaggaagttagcgcaaaaagcagagtcctcatgtatgatttcacgagcggtccaaggaaacgtggagatggagcttgaggttgaagtaaaagctgcccgcgcttgacgagttcaaacggtcagctccgggccgtttgattttttttagctttttgagacttggaacggttcagcaggatgacgcccgtgatgaccaaaacaagcccgatcatcattttgactgtcatggcctccttaaaaacaaaaaagccgacaattgccgttaaagcggtgccgacacctgaccatgtcgcgtatgcggcggataaatcaaggcttttcaaagagaagctcaaaaacataaaagaggctccgattccggcgatgacgccgagagcgggccacaggtgcgtaaaaccgtccgacagcttcagcatcgtgctcccgaacacttctgatacaatggctaatgccaagcaaagtaatcctttcatcagcatgcctctcctttctaccaattcatcaaaatgacaccggccaataagaaaaagagtccgatgacggcctgcttgtccagtttttcatgaaaccatttcgctccgataatggatgcgagcaccgttccggctccgctccatgttgcataggataagctaagcggaatgagattcagtgtcagtgaaagcatataaaaggccaatgaatagcctgccactacaagcgcgctcggcaaaaaccgcgtaaatccgcgggagaccttcagcatggccgcgccgattgactctgataaaatagcaattgtgaggaagatataacccagaatcatatcaaatccccctctcatcataatccttatgccttttgtttaaggcagtaaaataaaataatatccgaactttgcccgccaagtcaagacattaggcctatacaaaaaggcccctgaaaggagccctttttgattgtcttagtagtaatacggatagtaagggtagctgtaacctccgtacaaatacggattgaacaaagcgcttccgacaagccccccgacaagccctccgacaaacggtccgccgtaaaaaccaaacggccgtccgaacccgccaaaccaagggcggccaaaccaaggccggccaaaaccaaaacccggccgtccgaagccgaatccgaatccgggacgcccgaacccgaatcccggccgtccgaacccaaatccgggccgtccaaactgtctcatatcactatctgcttcgtatgtgtattcttcattcataatttaggtacctccaagaataaatttgagatgataacagagtattcagcccaccaatttttgattgggcgtttatcaaaaaaataaaggagtgagcttttgtgggcctgtatcagtccgattggtcaaaaaaacctccgcacacacacgcataccgggctgttacggatgtagtgcagggacattaccatgtgatcgaaggcttttcgcaaccggagaacggcagcaatacagatgagcatacacatttctatacgggcatcacctcgtttgaaaacggccattttcataggtattacggcatttccggccctgccatcccgagggttgacggaacacattaccatgagctttcagagaccacctttgccgcctacaatgagccgattcagatccagcacggcggtgtcgtttacgatccgcgggaggaaggacggaaaacgcaccgccatacgctcaaaggaaaaacgagagaggttgtcggaaacgagccgatcgggtggtagcggacgtttagcgctcaggaaaaagggcaaaatggataggtgcctgaagaaatgaatgctataattagggggagatttataaaagagagtgatacatattgaaaaataaaaaacagcctgtcgtcatacttgtcggaccgacggcagtcggaaaaacaaaactaagcatcggactcgcgaaaatgctgaatgcggaaatcatcagcggagattccatgcaggtatataaagggatggacatcggaacggccaaagtcaccgaagaagagacagaaggcgtgccgcatcacctgattgatattttggagccgtccgacactttttcaacggcggattatcagaaaatggtaaggggaaaaatcaccgagattgccgatagaggaaagctgccgatgattgtcgggggaacgggtctgtacattcagtccgtgctgtatgactatacgttcacggaaaactccggcgaccctgtattccgggagcgcatggagaaactggcggctgaagaaggggcggaagcgcttcatgccaagcttgcggcagccgacccggaagcggcggcagccattcatcaaaacaacacgcgaagagtcatccgcgcgctcgaaattctgcatgtatcgggaaaaacaatgtcagagcatcttaaaacccaaaaacgggagctgctttacaatgcggttcttatcggtcttacaatggacagagaagtgctgtacggccggattaacgagcgcgttgacctgatgctggaaaccggccttcttgacgaagtaaagcggctgtatgatatgaatatccgggacagccaatcgattcaggcgatcggctataaagagctgtatgaatatcttgatggaaaagtgccgctccctcaggctgtggagcaattaaaacaaaattctaggcgatatgcgaaacgccagctgacctggtttcgcaataaaatgcccgtttcatggacagatatgacgccgcctgttgatattgagcagaaaaaaaaggaaattttcgagtgcatagcaggaaaactggaaatttaatcgaaacagtattgtattgagaaccaaggaggacgaaacatgaaaccgattaatattcaagatcagtttttgaatcaaatccgaaaagacaatacgttcgtcacggtgtttttactcaacggcttccagcttcgcggccaggtaaaaggctttgacaactttaccgttttgctcgaaacggaggggaagcagcagcttatttataaacatgccatctccacgttcgccccgcaaaaaaacgtccagcttgagcttgaatagactttttgaaaaagaccatgaacaatggtctttttctatgcgcatctgtatattgcaggccgtatatcggaaacataaaagggggttcggaaaatcgtgttcgaaagtgaaaatgaactgagaagaatcaggattacgctcgtttggatcgctgtttttttgctgtttggagcttgcagcaatcatgagacggtggtgacggatgatgacggcggctcatcggatgccgaaccgcagacagaaggcatggtgcagctggaacataatcgtttcggcatcgtcgaggacggttacttaaaaatataccgctatgatgaaaaaacgaataaaatcgaactgaaaaaagaaacggcgctggatgagcttgaataaatttcacaagcgttcgaatttacaaagcgggccgcacaagctacactaagtactgacattgatcatgcagagggtgagacgattgaaacacaaggtgataatcaaccattgggaagaaacttgtgaagatgattcctgctatgaatatggaaccagcatcatcgttgacggcaaagaactgatcagagaggcttccatcacaagcgctctgaaagccgtactgaaagaaatcggtgctgatgtggagattgaagaaaccgttgaaagcgaaaaaaaatgtgattcttacaaaaaataagaataaaagtctagactactaagcagttttttttcatgttatgatagacatcggcttacacatgacaccttgagtaggatgagagatgattctcgttctgctctcttttttgggcgttaatcgggccagagccaaagtccgctctttcaaaaatatgaattttttataaatcgatctcaatatgttgtgtttttctgagaggttagtatactatatatagtgttaagagattcattatttttgataggtcgtgataaggatggttcaaatcatatttgattcaaagacagggaatgttcagcgttttgtgaataaaacagactttcagctgatccgcaaggtggacgaaacggaccacgtggacactccgtttgttttggtcacctacacgacaaacttcggtcaggtaccggcatcaacacaatcatttctcgaaaaatacgcccatctcttattaggagtcgctgcgagcggcaacaaagtatggggcgataactttgcaaaaagcgccgataccatttcaagacaatatcaggtgccgatcttgcacaaatttgaactcagcggcacatctaaagacgttgaattgtttactcaggaggtagaaagagttgtcacaaaatcaagtgccaaaatggatccagttaaataacgaaatcatgatccaacaagatggaaaatttcagtttgataaagataaagaggctgtacatagctattttgttgactatatcaatcaaaacacagtttactttcacgatttaaaagagaagctggattatttgattgaaaaccaatactacgaagaggaattcttaagcctttactcttttgaagacattaaagaagtgtttaagacagcttacgcaaagaagtttcgttttccttccttcatgagtgcgtttaaattttataatgactatgctttgaaaacgaatgacaagaaaagaatcctcgagcgctatgaggaccgaatctcaatcgtcgcgctgttcttcgcaaacggcgacactgagaaagcaaaagaatatgtaaacctgatgatcaaccaggaatatcagccgagtacaccgacatttttgaatgccggcagaaaacgccgcggagaactggtgagctgcttcttgctcgaagtcaatgattccttaaacgatatttcacgggcgatcgatatttccatgcagctgtctaaattgggcggcggggtttctcttaatctgtccaagcttcgcgcgaaaggtgaagcgattaaagatgttgaaaacgccacaaaaggcgttgtaggcgtcatgaagcttcttgataatgcgttccgttacgctgaccaaatgggccaaagacaaggctcaggcgcggcgtatttaaatattttccaccgcgatatcaatgattttcttgatacgaaaaagatttctgcggatgaagatgtgcgcgtcaaaacgctttctatcggtgtcgtcattccggataagttcgttgagcttgcacgtgaggacaaagcggcttatgtattctatccgcatacgatttataaagaatacggccagcatatggacgaaatggacatgaccgcgatgtatgaagagcttgtcgacaacccgcgtgtcaaaaaagaaaaagtgaatgcgcgcaaattgcttgaaaagcttgccgttctccgttctgagtcaggttatccgtacattatgttccaggacaacgtaaacaaagagcacgcgaataaccacgtatcaaaagtgaaattctcgaacctttgctctgaagtgcttcaggcgtcacaggtttcggcttacacagattatgatgaagaagacgaaatcggcttggacatttcctgcaaccttggttcattaaatattttgaatgtcatgaaacataaatcgattgagcgcacggtgaaactcgcgacggattccctgactcatgtatctgagacgacggacatccgcaacgcgccggcagtcagacgcgcgaacaaagcgatgaaatcgatcggcttaggcgccatgaacctccacggctacctggctcaaaacggcatcgcgtatgaaagcccggaagcaagagatttcgcgaatacgttctttatgatggtgaacttttattccatccagcgttcagctgagcttgcgaaagaaaaaggcgaaacgtttgagcattatgaaggctccacttatgcaacgggagaatatttcaataaatatatcgaaaaagagttctcaccggcatacgaaaaaatcgctgcgctctttgaaggcatgcacattccgacaatcgaagactggaaagagctgaaggcgtttgtcgctgaaaacggcatgtaccacagctacagactgtgcatcgcgccgacaggctccatttcctacgtccaatccagcacggcgtccgttatgccgatcatggaacggatcgaagaaagaacatacggaaattcaaaaacgtattacccgatgccggggttagcgtctaataactggttcttctacaaagaagcttatgatatggacatgttcaaagtggtggatatgatcgcgacaatccagcagcatatcgatcagggaatcagctttaccctgtttttgaaagatacgatgacaactcgtgatctgaaccgtattgatctgtatgcccaccatagaggcatcaaaaccatttactatgcaagaacgaaagataccgggcaggacagctgtctttcttgtgtcgtttgattaaaggagagtttacagtgacaaaaatttatgacgcagcaaactggtcaaagcatgaagatgatttcacccaaatgttttacaaccaaaacgtaaagcagttttggcttccggaagagatcgcattaaacggcgatcttctcacttggaagtatttgggtaaaaatgagcaggatacgtacatgaaggtgctcgccggcctgacactgcttgatacagagcaggggaacacgggcatgccgattgtggccgagcacgtcgaaggccatcagcgaaaagcggttcttaatttcatggcgatgatggaaaacgcggtgcacgcaaaatcatattcaaatatttttatgacgcttgctccgactgaaacgattaatgaagtatttgaatgggttaaacaaaataaatatttgcagaaaaaagcgcaaatgattgtcgggctttacaaagccattcaaaaagatgatgaaatttcactgttcaaagcgatggttgcttccgtctatctggaaagcttccttttctacagcggtttctattatccgttatatttctacggacaaggaaaactgatgcaaagcggtgagatcattaacctgatccttcgtgacgaagcgattcacggcgtgtatgtcggtctccttgctcaggaaatttataataaacagacagaagagaaaaaagcagagcttcgtgaatttgcgattgaccttctgaatcagttatatgaaaatgagcttgaatatacagaggacttgtacgatcaagtcggactctcacacgatgtaaagaaattcatccgctataacgccaataaagctttgatgaacttagggttcgatccttactttgaagaagaggatattaatccgatcgtattaaacggattaaacaccaaaacaaaatcacatgatttcttctccatgaaagggaacggctacaaaaaggcgacggtagaaccgattaaggacgaagatttttattttggccaagatgaagagcagatataatatctgctcttttggcttgaatggagaggtaagacaggaggaacgggcatgaataaaatggatgaaatcatcttggctgcaccgcggagtgacgtctttcaaaacgaaatgctgacatttcagggagtcaacagcgaggaggaacgtatcgtaaacattatggctcaaattgaggcgcatttttttgaaatcagaagaggcgacgcggaagaggatccgcgatttaaacagccgattccgtatgtcgtcatccgccgcgatgatgaggtgtttgtgtatgaacggctcgcgggcggaggggaatcgcgcctccacaataagctttctctcggcttcggcggacacatgaaccctatggaaggggcggcttcattttcggaagtgctgaaacagaataccgaccgggagctggcggaagaactgtacattcgcgaggaggacaaacaaaacattgtcacactcggcctgatcaatgatgatgaaaacgatgtagggaaggtgcatatcggcatcctttctgcgctccagttagcgtctgcggcacaagtcgaagtgaaagaaaaagatcaaatcgccgggcgctggatgaaactgagcgaactgaaagaggaaaatgtgtatcagcgtcttgaagcttggtctcagtttgtcgccgatatacttcaataacaaaaaacccccgttcgtcccaaaaaagggagagcgggggttttttcatttagtcttgtataatgaaggcatcaaatccggctttttcggcccgcgcggccaacgcttcagcgtaatctctggaagagaatgcgccgatctgcactttaaataagccgccttttggaagcacaatcgcgtcaaaacctttagactccgcatcggcggcaagcgcatcagcatttgctttcactttgaatgcaccgatttgcactttatataagtcagcctttttttttagaccgaaagcttgctccaagcccttggcatgtcctcttgcaaggctttcaataaaactggctgttttcagtttgtttgcatcagctgacgtatcaacaaaaccattctccgtcaaaatcgccggcatacttgtctcccgcagcacatggaagttggctgttttttttcctcggtcattaaaacccgatgcttgaatcacttgcgtgtggacggctgattggtaagtcgaggtcggcgctccgacaccggggtaaatatagctttcgaatccggttccgcctcctgagttaatatgaatggataaaaaataatctgcgccccagctgttggcggcatccgttctttccgtcaggctgaccgtcttatcgcttgtcctgctcatcgtgacagaaactccttcatactcattcgtcagaatcgtgcgcaaagccagcgcgatctccagcgtgaccgctttttcctgaagtccgtttccggttgcacctgaatcagttccgccatgaccggggtctataaaaattttaaccattctccatcacctcattacagcatatgatgataatcaaaaggtgcttgtacggctgtcattcatgaaaaaaatgagaaatacacccaacatttcccggaaaataaaaataaatggtttgtcctcccgtttcttctgaatacaataagaaatgaaaaatatttctcgggaaagcgcaggattcaacatcattcccgaagagaacggaaaaaatgacagataaagaggaaaaggggcctcatgatgataggcggatgtcaccgaaccgcttcatcatgagtaagataaagagagaacagagaggtgagcatgttggagcgcgctgtaacctataaaaataacggacaaattaacatcattcttaatggccaaaagcaagtgctgacaaatgcagaagctgaggcggaatatcaggccgccctgcaaaaaaatgaagccaagcacagcattctgaaagaaattgaaaaagaaatgaacacattagtgggtatggaagaaatgaaacgcaacattaaagaaatttacgcgtggatattcgtcaaccaaaaacgggccgaacaagggcttaaagtcggaaaacaagctcttcatatgatgttcaaagggaacccaggcaccgggaaaaccaccgtcgcgagactgatcggcaagcttttcttcgaaatgaacgtgctttccaaaggacatctgatcgaagcggaacgtgctgatctggtcggtgaatacatcggacacacggcgcaaaaaacgagagatctgattaaaaaatcgctcgggggcattttattcattgatgaagcatactcacttgcaaggggcggagaaaaggatttcggtaaagaggcgattgatacgcttgtcaagcatatggaagacaaacagcatgaatttattctgattctggcagggtactcaagagaaatgacacatttcctgtcattaaatcccggcctgcaatcgcgtttccctatcagcatcgattttccggattactctgtcactcagctgatggacatcgcaaagcgcatgatagcagagcgggagtatcaattaagccaggaagccgagtggaagttaaaagattacttaatgacagtgaaaagcacgacaagccccataaaattcagcaacgggcgctttgtcagaaacgtgattgaaaaatcaatccgcgctcaggccatgagacttttaatgggagaccaatacttaaaaaacgatttaatgacgatcaagagccaggatttacttatacaagatgaggcggcagctcacgaatagacctctcagccggtttgaggggtctcttttttatttctctctttaaaacccgccggatgtgtggtatacgccctgcgggtttggtatgatagtactactgcccaatacgacacagaaaggaacatccatttgaacgaacaggaaggaaaaagagaaacggtcattttggtcggctgccagcttccgcacatgacagatgagcactttgaacattccatggaagagcttgcttcattgacaaaaacggctgacggaacggtgctgacccggattacgcaaaaacggaacagagcggatgccgctacatatataggcaaggggaaagtagacgagctgaaggcgctgtgtgaagagcttgaagcggatctgatcatttttaatgatgaactgtcaccgagccagcttaaatcactcgccactgcaattgaagcgaagatcatcgaccgcacgcagcttattttggatattttcgcaaaaagggcgaagacgagagaaggaaagcttcagatcgaattggcccagcttcaatacgcgctgccccgtctgagcggacaaggaatcaatctctcaagacaaggcggcggaatcgggacgagagggcccggtgagacaaagcttgaaacagaccggcgccacattagaaaccgcatacacgaaattaacgtgcagctgtcaacggttatccgccacagaagccgttatcgggagagacgtaaaaagaacggcgtgcttcaggctgcactcgtcggttataccaatgccggaaaatcaacatggttcaatcaattaacaagctcagacagctatgaagaagatctgctgtttgcaacacttgatccgatgacgagaaagatggcgctcccaagcggctacagcgtccttttgtctgatacggtcggcttcattcaggacctgccgacgacgctgattgcggctttccgctcaacgcttgaggaagtgaaggaagcagacttgatcattcatgtcattgattcatccaatgaagattatgccggacatgaacagactgtcctcggtctgttaaaagagcttgaggcagatgatattccggtgctgaccgcttataacaaacgtgatgatacacttcctgacttcatcccgacagcgggagaaggccacatcatgatcagcgccagaatcgccggggatgaagcaaaactaaaagcggaaatcgaagcttatttgcgccgggagctgatgacgccgtatgaagttcatgtgcctgccgccgaaggcaaattgatgtcacgcatcaaatcagagaccatgatcgacagcctttattttaatgaagaaaatgaacgctacgaagtctcaggttatgtacaggaagaacaaagcatactcggagaactgaagaaattcatgtaaggaaggtatacacaacatgtttgacacactgacccatggcgctcttttacaaaaaaccgccgaagaaacagaagcggaaatctccgccgttcataaaagaatagaagaaatcagtgaacggaatgaatggagagtcctgcaaagctacagaaaacataaagtaagcgatacgcattttacgccttcaaccggatacggttatgatgatatcggacgagatacactggagaagatctatgctgatgtgttcggaggagaggcgggactcgtgcggccgcaaatcatttccggaacgcatgcgatttcaatcgcgctcttcggtgtgctgagacccggggacgaattgctttatataacaggcaagccttacgatacactcgaggaaatcgtcggagtaagaggcggggagtattcaggctcgcttaaggaatttcaaatcggatacaatgcagtcgatttaacatcagaaggcagagtggactttgaagcggtccgggctgcaatccggccgaatacaaaagtgatcggcatccagcgttcaaaaggatatgcgaatcgtccgtctttcagaataaatgaaattaaagagatgattcgtttcgtaaaggaaatcaaagaagatgtcattgtttttgtggacaattgctacggagaatttgcagaagagcgggaaccctgccacgtcggagcggatcttatggccggctccctgatcaaaaacccgggcggcggccttgctaaaacgggcggctatcttgtagggaaagccaagtggattgaggcctgctcttaccggatgacctccccgggaatcggaagtgaagccggcgcttcgctttattcactgcaggaaatgtatcaaggtttctttctcgctccgcatgtagtggcgcaaagcttgaagggagcggtatttaccgcccgttttcttgaaaagctcggctttacgtcaaaccctgcatggaatgcgccgagaacggatctgattcaatcagttgagtttcaggaccctgataagatgatcgctttttgccaggcgatacaatatgcttcaccgattaatgcgcatgtgacgccttatccgagctatatgccgggatatgaagacgatgtcattatggcagcgggcactttcgtacagggagcaagcattgaattatcagcagatggacctatcagaccgccttatgtcgcgtatgtccaaggaggattaacctacgcgcacgtgaaaaatgcgatttgcagcgccgtaaatgctttaatggaaaaagagctgatttaggccgtttgcaattttcaaagaatttgatgttaagattccttacattgtgttgacacaaaatataacatcacctataatgagactaagataagaaaaggaggaaattgagatgagtgataacattcgccgctcaatgcctttatttccaattgggattgtcatgcagttaacagaactttctgcccggcaaattcgatattatgaggaaaatggattgatatttccagcgagaagcgaaggaaatagacgattattttcattccatgatgtagataaactgttagaaatcaaaaatctgattgaacaaggcgtcaatatggcggggatcaaacaaattctggataaggcatctgccgaaccggaagaaaaatccgaaaaaaccgccaaaccgatgaagcacaatctgtctgatgacgaactcagaaagcttctgaaaaacgaactgatgcaggcaggccgtttccagcggggaaatactttccgccaaggtgacatgtcccgattctttcattaatccgttagcaactgttttgctatatacatttaccttttagaggaggagttttacgaaatggcaaagtacacaagagaagacatcgtaaaattagtaaatgaggaaaacgtaaagtatatccgccttcaattcacagacattctcggaacgattaaaaacgtggaaattcctgtgagccagcttgaaaaagcacttgataataaatgcatgttcgacggttcttccatcgaaggtttcgtccgtatcgaagagtctgatatgtacttatatcctgatctgaacacatttgtaatcttcccatggacggctgaaaaaggtaaagtagcacgcttcatctgtgacatttacaatccggacggcacgccgttcgaaggtgacccgcgtaacaacctcaaacggattctgaaagaaatgaaagaactcggtttcagcgatttcaatcttggacctgagcctgaattcttcctgtttaaattagatgaaaaaggcgaaccgacgcttgaattgaacgataaaggcggatacttcgacctggctccgactgacttgggagaaaactgccgccgcgatatcgtgcttgagcttgaagaaatgggctttgaaatcgaagcatctcaccatgaagttgctccgggtcagcacgaaatcgattttaaatatgctggtgccatccgttcttgtgacgacatccaaactttcaaactggttgtcaaaacgatcgcccgcaaacacggtctgcatgcgacattcatgccaaaaccgctgttcggcgtaaacggttccggtatgcactgcaacctatcactctttaaagatagcgttaacgcgttctttgataaagacgctgatcttcagctgagtgaaacagcaaaacatttcattgccggtatcgtaaaacacgcgacaagctttacggctgtcacaaacccgacagtgaactcttacaaacgccttgttccgggctatgaagcaccttgctacgtggcatggagcgcgcaaaacagaagcccgctgatccgtatcccggcttcccgcggcatcagcacgcgtgttgaagtccgcagcgtagacccggcggcaaacccgtacctggcgttaagcgtattgcttgcagcaggccttgacggaatcaaaaacaaacttgaagcaccggctccgattgaccgcaacatctacgtcatgagcaaagaagagcgcatggaaaacggcatcgtagatcttccggcgacgctggcggaagctctcgacgaattcaaatcaaacgaagtcatggttgcggcactcggtgagcacctgttcgaacacttcatcgaagcaaaagaaatcgaatgggatatgttccgcacacaggttcatccgtgggagcgcgaacaatacatgtctcagtattaatctctcaatcccttggcactattggtgccaggggattttttggttttggtcataagattaaaagaacaacatttttggtccttgaccagaatatgaccaaaaaaaattgaagttataattgaggacacgtatttattgtaatcccttattcggtttaggatgaaggctaaatgaagctaattatgttctaaaattgaaccggccatttttattttcaaaaagcaggagcaggaaattcatcaattttgatacgaagtaaactataaggtttctgtcgtaagtcttttccataatgaaatctagcctgccgatgtaattggttcacgatgacatataagtattcatccggaccaatcgaaaaagtatccggccataaaattctcggatcatgtgcgatggtttccattgtgccattcggcagcatctttcgaatactattgttctcataatctccggcataaatggctcctttcgcatctgtaatcattccatcagacgcgcctttttctccccaatacgccacatgataaagtaaatccatgtccggtatatttctatctctcagggcttctgttgagatcgagaacagatgacggctggtcagtggacaaaaaaataatacctttccgtcaggagaaatcgcaataccgtcggatgccagcctaaatggggaagttgaaccatccctgttacgattcatcaaaattttgccttctattttcggtataaaataggaatccggtgaagttggatttgctccatttaaccgtctaaatgcgtttccggtttctaaatccacgacgataatagctcctggtcctttggaagaagaatccgttatataggcataacctgcagttccaacacgaaaatcaaatcggacatcattcaggtaagttgttggaaggacaacatcttctgtaaaggtataaactcttctgattgtattggtttttaaatcaacagcgactaattttgccccgcctttaattggttcagaaaaattgggtgccgccgtatctagtacccaaagggtccctcttccatcagtaactacactttggacactgatgaaagtcattttgatattctcagggttaaccaaattggtttgtaaatcaggataaggctgcaatttatccccaattatttccgccaccgtaaatttaacatcgtctccccatttcggaaaacaaatgaaaatacgaccagtttctgaaacagtaacaccggtaggcatagctccataaaatgcataaaccagttctaaatccccaaaatatttttcaaaaggcagcataggtttcataatatcctcctcaaccaattaaacgggatatcacttatatatgattcgcattttttctagtgcatgtttcttaataagtttttctaaacaaaagatgatggaagttcttatcatttaataagtcagtcaggtgacacaggggggtttacttaacgtctgtcgaagcagtcggcaattacaacatggtatgtcctttggtcggttttaaattctctgaaaaaagagttgaaaaagcagaaaagattttataatatgaaatcaagttagtttgttcgatcaacaaactaataaaaccactttaattgtccatcatgtaaaggtcttaaatgggagggggataagaggctcgatttaattggaggtatataaaaagcgaaagccaagcttttatcctgttcactgctatctgatcaccatttggatgttgaaaatgctctgtgaaagtaaaccgctatcatttttttgaaagcgcttttatatgccgctcactggccgataattttaaagaaatgttataccatttcatcatgttccttatgtaaaggatcgaaaaggggagaaatcatgctcagtgaaaatgtaaagaagatcagcatggttgaaaaagttggatatgcgtctggagattttgcatgtaatttaatttatgcaacagtgtctacgtatcttttgttcttctatacagatgtttttggtttatcggcagcaacagccggtacgatgtttttagtggttagaatcatcgacgctctcgctgatccttttattggaacaatagttgacagaacaaatagcaggtttggccgcttcagaccgtatcttttattcggagcttttccctttgtcatattggcaatactctgttttacaaccccggatttttcggatatggggaaattaatatatgcctatatcacctatgtcggcttatcgcttacatacaccatgataaacgtgccatatggcgcgttaacatctgcaatgaccagaaataatcaagaagttgttagtataacgtctgtccgtatgttatttgcaaatcttggaggacttgtcgttgcattttttgttcccttactggctgcttatttaagcgataattccggcagcgaatctcttggctggcagctaaccatgggtattatgggagttataggcgggtgccttttaatcttttgttttaaaagcacaaaagagcgtgtcacgcttcaaaaatcggaagaaaaaattaaattttcggatatatttgagcaatttcgtgttaatcggcctctagttgtattaagtattttctttattattatttttggagtgaattcaatcagtaattcggttggcatctattacgtaacgtataatttagaaagagcagatttagtgaagtggtacggtttgttgggaagtttgcctgctttggtcattttaccgtttattccaaagcttcatcaattattagggaagaagaaattactaaactatgcattattactgaatatgatcggcctcttagctttacttttcgttccgtcaagtaatgtattcctgatactttcctttcgattgctggctgctgcaggaagtctcactgccgggggatatatgtgggcgcttattcctgaaacaatagaatatggagagtataagaccgggaaaagaatgggcggtcttatatacgctattatcggatttttctttaaatttggcatggccttgggaggggttgtaccgggtttggttctagatcagtttggatatgtggcaaatcaggtgcaaacgccggaggcattgacgggaattttaattacaacaaccattattcccgtgttcttactggttctggccatgattgatattaatttctataacttagatgagaaaaaatataaaagcatggttcgagaattagagaatagagacaaagtttatttggatcatattgacgatttcaaagcttaaaacatgatgagtgaacagaaaatagctgaggaggagttcaaaatgaagatcattaatccagtacttaaaggattcaaccccgatccgagtatttgcagggttggagaggattattatatcgctgtatctacatttgagtggtttccgggagtccagatacaccactcaaaagatttagtcaattggcacttagttgcacatccattacagagagtatcacaattagacatgaaaggaaatcctaattcaggcggggtctgggcgccatgtttaagttacagcgacggaaagttttggctgatctatacggatgttaaggtcgtagatggcgcctggaaagattgccacaattatttagtgacttgtgacacgattgatggtgattggggggagccgatcacattaaacagctcgggttttgatgcttctttgttccatgatacggatgggaaaaaatatttattaaatatgttatgggatcagcgtattgatcggcactcctttggaggcattgtcatgcaggaatattctgataaggagcaaaaactaatcggtaaaccgaaagtgatttttaaaggaactgaaagaaagctgacagaagcgccgcacctttaccgtatcgggaactattattatttattaaccgcagaaggaggaacacggttcgaacatgctgctacaattgcccgttctgcaaatattgagggtccatatgaagtacatcctgataatcctatcttaacgtcatggcatgcgccggaaaatccgctgcaaaaatgcggacatgcatccattgtacaaacacatacaggtgagtggtatttagctcatttaacgggacgtcccattcatccggacgatgattcaatttttcagcagagaggatattgtcctctgggcagagaaacagctattcaaaagctctattggaaagatggctggccttatgtagaaggcggaaaagaagggagcttggaagtggatgcgccttctataccagaaacaatgtttgaagaaacctatccggaagttgatgaatttgaggatgcaacattaaatattaattttcaaacgttaagaatcccgtttacggagaaattaggttcattaactcaagcgccaaatcatttacgattatatggccatgaatccttaacttcgacatttactcaggcatttgtagccagacgctggcaaagcctccattttgaagcggaaacggctgttgcgttttatccggaaaattttcagcaagccgctggtttggtgaactattacaatacagagaactggacggctcttcaagtcacgtatgatgaagaacttggccgtattcttgaattaacgatatgtgataacttttctttttcacaaccgttaaaaaataaaattgtgattcctcgtgaagtcaagtatgtctatttaaaagtgaatattgaaaacgaaaaatattattatttgtattcatttaacaaagaagattggcacaaaatcgacattgcattagaatcgaaaaaattatcagatgattacatccgcggcgggggattctttacaggagcttttgtagggatgcaatgccaagatacgagcggtcatcatattccggccgacttcagatattttcgttataaagaaaaataattagcacatgaaaaaggagatttctattttagaactcctttttcatattagaaggtgcctatgtcagtattgattcagaaatactcctagaataaaaaaacccatctttaaagatgagcgtaaaacatagaagtatgtacattcagttatgaaccatgtcgagaaaatgatcaataacaatagaggacattcctagagcaggggcattttttcctaagatagatggtaataattcatagctattgtctagttgggaataaaccctggatgacacttcgcttttaattgaatgtaaaaccataggatgcgattcaatgatgctgtttcttaaaatgatggcttgcggattaaatgtatttaaaatattggtcaggcctattcctaaatagaaaccaaaattctgtaatgcctgtaaagttccaacatcattcagatgggcaaggtctatgatatcttggctggacacttttttctctttcgtctgaagagatgttaataaagccttctctgaagcatacaattcccagcagcctcggtttccgcagctgcatttaggacccttaaagtctattgtcatatgtcccatttctccagagaatccgccaacccctctatataaatgattgttgatcataacgccgatccctattcctgtaccgatacttgcataaatgatgttatcgtgattttttgcagctccaaatactttttctccgtatgcgccggcatttgcctcattttcaataaaaacgggcacattgaacttcttttggatgaaagattttaagtcaatatctctccagttggcgttcggagcgaaaacaattttttgatttttgtcaatcagcccgggcgcgcatatccctataccaataagaccgtatggagattgcggcatgtttgcaataaagtgatgaatcatctcaattaaaatatctttagtgatttctggagaattgcattccaaatgatggtgttgatcaaggacgatcgtcccttcaagatctgttaaaatgccattaacataatccacgccaacatctattcctacggagtatcctgcttttttattaaaaacaagcataacaggtcttctgcctccgcttgattgtccctgaccgatttcaaatacgaggttttctttcattaatgtgtttacctgtgacgaaacagttgatttatttaatccggtcatttcagataattttgctcttgaaataggagaattcttaagtatttcgtttagtaataacttttggttaacttttttgacaaaggcttgatcagcgatatccacttcatccactccatttgtataatctttaaattaagttgaacgttctgtgttatcgtgcgaaacgcagtacatagcgaatccaacctttattatatctaatgtgttcgtaaaaaactaaaaaaaatattgaaaatactgatgaggttatataagatgaaaataagttagtttgtttgggcaacaaactaatgtgcaacatgacataaaagcatctgtatttgaatgatcatgtttagaatttatttttaagggggaaatcacacatggctcactctcattccggttcggtcaactattttgaaagcgcaaacaaattgatttacgaagggaaagaatccacgaatcctttagcatttaaatactataattctcaagaagtaattggcggaaaaacgatgaaagagcatttgcgattttctattgcctattggcatacatttaccgctgacggcacagacatttttggcgcagctacgatgcaaagaccgtgggatcactataaaggcatggatctggcgagagcgagggtagatgcagcgtttgagctgtttgaaaaactggatgcgccattttttgcttttcatgaccgggatatcgcaccggaaggaagtacgttaaaagagacaaatcaaaatctggatataatcgtggacatgataaaagactacatgagaaccagcggcgttaagctattatggaatactgcaaacatgtttacgaatccccgtttcgtccatggtgcggcgacttcttgtaatgcagatgtatttgcgtatgccgcagcccaagtaaaaaaaggattagaaacagcaaaggagcttggcgccgagaactatgtattttggggcggacgtgaagggtacgaaactttgttaaataccgatttaaaatttgagcttgataatatggccagatttatgcatatggcagcggattatgcgaaggaaatcgggtatacagggcagtttttgattgaaccaaaaccaaaagagccgaccacccatcaatatgatacggacgcagcaacaaccattgcctttttaaaacaatatggcttagagaatcattttaaattaaatctcgaagccaatcatgccacattagccgggcatacattcgaacatgaattacgcatggcgagagtgcatggccttcttggctctgttgacgcgaatcagggtgatccgcttttaggctgggacacagatgaatttccgacagatttatattctgcgacattagcaatgtacgaaatcctgcaaaatggcggtcttggaagcggcggattaaactttgacgcaaaggtcaggagatcttcttttgagcctgatgatttactatatgcccatgttgcagggatggatacatttgcaagagggttgaaagccgcccacaaattaatcgaagatcgtgtgtttgaagatgtgattcaacaccgttaccgcagctttactgaagggattgggcttgaaattgcagaaggaagagctgattttaagacgcttgagcaatatgcgctgaacaatcagccaattaaaaacgaatcagggagacaggagcggttaaaagcgatattaaaccaatacattttagaggtataacaaatgaaaaaagaagctccagatcccgctataaaaagatgcaggcagccgagttcccggaatggcccgtcatgaagttactgttatggcgggtcatttcaatggagatctatttagagaggaaggagtgaaaaaatgaagtatgtcattggaatagatcttggtacgagtgccgttaaaaccattttagtcaatcaaaacggcaaggtttgtgcagaaacgtccaaaagttacccgctcatccaagagaaggcgggatatagtgagcaaaatcctgaagactgggtgcagcaaacaattgaagcattggctgaattgatttcgatatccaacgttcaagccggggatattgacgggattagctattcaggacaaatgcatgggttagtactgcttgatcaagatcggcgggtgctgcgtcatgcgattctttggaatgataccagaacgacgcctcaatgtagcaggatgaccgagacatttggcgatcatctgcttgatatcacaaaaaaccgtgtccttgaagggtttacattacctaaaatgttatgggtgaaggaacatgagcctgaactttttaacaaaaccgctgtttttttgcttccgaaagactatgtgagattccgcatgactggcgccattcacaccgaatactccgatgcggcgggaacgttacttttacatatgacccgcaaagagtggagcgatgagatttgcaatcaatatggtatttcagcggaaatttgtcctccgcttgttgaatcccatgacagtgtaggatcgctgcttccgagcgttgcggcggagactgggctgttggaaaaaacaaaagtgtacgccgggggagcagacaatgcttgcggtgctgtcggagccggtattctttcttccggaaaaacattatgcagtatcgggacgtcaggagtcatactttcctgtgaagaagacaaagaaagggactttaaagggaaagtgcacttttttaatcatggaaagaaggattctttttatacgatgggagtcacgctcgctgctggatacagcttagactggttcaaaagaacgtttgcgccgaacgaatcgtttgaacaattattgcggggggtggaatctgttccgataggagcaaatggactgctgtacactccttacttagtcggtgaaagaacgccgcatgctgattcatctattcggggaagcttgatcggaatggacggagcccataaaagagagcactttttgagggcgataatggaaggcatcacattctctttatatgaatcaattgagctattccgcgaagcgggaaaatcagttgatacggttgtctctattggcgggggagctaaaaatgaaacgtggcttcaaatgcaggctgatattttcaatacgagggttgttaagttagagaatgaacaaggtcccgccatgggggctgcgatgttagctgccttcggaagcgggtggtttgactctcttgaagaatgtgcagagcagttcattcatgaagcagctgcattttatccaaaagaacaaaatgttcaaaaatataaaacactattcgagttgtataagaacatttacgttcacacaaaagatctcaatacagctttaaagagctttcgacaaaaatgaagaaagaacctcgccaaattggccaggttctttttatattgcacaaaaacagacacggtgatataatcagaacacgcgcgctttctttgtgaaaagtcatagatatccatcttatattatgattatatcatgctgaaaagctcttgtcaaatttttttgaaggggagatatagaatgagttctttggttctcggcattcacgaaattgaaaaaacacagcctttgctcgttggaggaaaagggttacatttaggggaattatcaaaaattcaaggaatacaagtaccggaaggattttgtgtcacaaccgcaggatatcaaaaagccattgaacaaaacgaaacgttacaagcgctgttggttcaactgaccatgctgaaagcggagaatcgggatcaaattggtgaagtcagcaaaaaaatccggcaaaccattatggaagcagaaattccttcagatgtagtcaaagcagttgcttgccatctctcccggttcggcgaagaacatgcctatgccgtacgttccagtgcgacagctgaggatttaccacatgcctcttttgccggtcaacaagacacctatttaaatattaccggcctcgatacgatcttgcagcatatcagtaaatgttgggcgtccctatttacggatcgcgcggtcatttaccgtatgcaaaatggatttgatcacagacaagtttatttatccgttatcatccaaaggatggtgttccctcaggcttcgggaattttatttaccgctgatccgatgaccggaaaccgaaagctgctgtccatcgatgccggttttggacttggtgaagcactggtctccggcttagtctctgccgattgttataaagtacaggacgggcaaatcgtcgataagagaatagaaactaaaaaattggctatctatggacgaaaagaaggcggaacagaaacacaggaaatcgctcttgatcagcaaaagattcaaacactgactgatgaacaaattttacagctggcacgtatcgggagacagatcgaagctcatttcggccagccgcaagatatcgaatggtgtttggaccgcgatactttttatattgttcaaagccgtccgatcacaacgttataccccgttcctgaagcgaacgatcaagaaaatcacgtctatatctctgttggtcatcagcaaatgatgacggatcccataaaaccccttggattgtctttttttctgttgacgactgctgcacccatgcgtaaagccggcggaaggctattcgttgatgtcacacatcaactggcatctcctaatgtcagagaagttttcttaaaaggcatggggcagcacgatccgctcttaaaagacgcacttatgaccataatagagcgagatgatttcattaagccgataccggataaaacggcgccgattcccggcaaaggcaatgcagatatgccggatcaagctgaaaacgatccggcaattgtttctgatttgattaagagcagtcaggcatcgatagaagagttaaaacaaaacatccagacgaaatcaggatctgatttatttcgttttattttggaagatatccaggaattaaagaagattctatttaacccaaaaagttcagtgttgattcgaactgcaatggatgcttcattatggattaacgaaaaaatgaacgagtggttaggtgaaaaaaacgcagcagatacgctttctcaatctgtaccccataatattacttcagaaatggggcttgcgctattggacgtcgccgatgtgatccgcccttatccagaagtaattgcctatttagagaatgtaaaagatgatcactttttggatgggctggtgacgtttgaaggcgggcgggaaacccgtgacgctatctatgcttatctcaacaagtacggaatgcgatgtgccggagaaattgatatgacaagaactcgatggagcgaaaaaccaactgcacttgtccctatgattcttaataatctcaaaaactttgagccaaatgccagccagcggaaatttgagcaagggcggcaggaggcgttgaagaaagaacaagagttattagaccgattgaagcaattaccggatggtgaacaaaaagccaaagaaactaaacgaatgatccgcatcatccggaacttcagcgggttcagggaatatccaaaatacggcatgatcagccgctacttcgtttataagcaggctttactgaaagaagccgaacaactcgcagaagcgggcgttattcatgaaaaagaagacatatactatctcacttttgaagaacttcaggaagtcgtacgcacacataaattggattaccaaatcatcagcacacgaaaaggcgagtacaaagtatatgaaaaactagctccgccgcgtgttatcacgtctgacggtgaaatcgttacaggcgagtacaaacgagaaaatctcccggccggagcgattgcagggctgcccgtttcctcgggagtcatagaggggcgggcacgggttattttaaacatggaagatgccgatttggaagatggggatatattagttacctcctatactgatcccagctggacaccattgtttgtatccataaaaggcctggtcactgaagttggcggactgatgacccacggagcggttatcgcgcgtgaatacggcttacctgcagttgtcggagttgaaaatgcaacccaattgataaaagatgggcagcgaatacgcgttcatggaacagaaggctctattgaaatattataatagcgggggtgtgcagcacgtcaccagatatttcccgcattttaactaaaaaagaccggaacctcttaaaggaggaatccggtttttttatgtgaaaatgactcaatgtgtgaacaccgcattttgtgggtgagcccttcagtgactaaatctttttatgaaggtgagtaatatcctttttaagttcacaacatctgtaatccgatgaattaaaaacgccttagtaacaattatttaggagctatgttcatgaacaagtctttattcaaaacaaaatgacctattgggttaatggcgttaaagatgaagataagtctggtgtctttgaaagagaaaagtctgcagaagatacaacgggcccatcatcaaacatgatgagcggttgaactggatatgtatcagattgtttaggcgataagaatattagccaatgggcaatcactggtttagctattttatatggaactgcttgcgaattgttgattttcggaatcgtttttaaagaatggatcacaacgccttttggattgttcgcctcattcttcatagcggcaatattggcgcaggcaggggaggaaactctcccgcttaccagagtaaaaataaaaaatgtttatctcagattggtttttttaaaaagtaaaaacgccataaaacttcttatggcgtctgtccgaactaagggatgcaatgtttgggagacgaatataaatcgtcaatgtgctagaaaaggaatgcagcacctacaatgattaacaaaatgaacagcacaacgatcaatacgaaagagtttccgccataatttccaccgtagttccccatattattgccacctcctgttgttaggatagtacataatatgccggacgataaaattcgacatggatttaagtctaaataagaaaaaatggatgttatgtctaaaatgaagagcttctaaaacaataaaataatgggaggttaactgaaagagagaaatggatgggacggtttgctgtttaaagaggagggatatggctaaacatgcaataaaactgtgtatgaaagtggtgagccatgaagttacttcatcatgcagaaccacatacgaagaggtacagggaaattatagttaacgaaaatattcatcattgcccgggcaagcgcagtatacgacaaatcaaaacaaatcacaaagggacggaaggtacgatacaaggaggctgcttgcgggtttgtggtgcagaataaagtttccgtttcaaaaaggtcgtatgtttattcggaactttacgtttattcctggagaatgcttgtaaaagaaagtcggcaaaactgccgactttcctaacggaatttagatctcaacagatctaaagaaaccatcgacactatcaccggtgccgctatcatatttcaggatgtattctcctttttggttaacgctgaattcctgaatgaacgttttccacgcatttaatgtcgtagaggatataaggaagaagcttcctgattgagcgagggtataacgatgccggggcggctgcggatcaactgaaacgaagtatattcccaggcaaggagtatttctataacctgaaacttttataaagcattaacgtataactttataaaggtaaataaggaggcttatgaatgggattaaaaaatttctttaatactgagttaaaatgctctatctgcggaaaaacattaaaatcaggagatgagataacagcttatcttacacttccgagtgagaagaagatgcctgtggggagaatggataaagtgttaagcaaacactctgataaggtctgctgtaaaaagtgcagtgagtaggtttttagtgttatgaggaacctctggcgggtttcctcataacaaatatcaaccaattaaattagaaaaaagcgaaattgtgatgattaaagtagataaagaactgagggataccaaagggatcatttttcgtttactttgcttttttgaaggtttgtttagctcgtggatcactgcaccccataaaagcatggatgctaaaatgataagactcatatgtaacaacactcctttgtttctataaattttaccatatatatcacaaggatgtcgattgaacgaacatctctataaaaagaagatgtttatctaaaattgttgagagattcagtgaactattatgcagattaaattgggcctgtgaagatgaagctgtagacataagcaaaggttcaacagccgttttattgaatatcagatgaatttgcggcgtcttatgaagaactggcttcacagtttgaagaatggatgaatagccaaaccgatgtagaacaaaaaatgaacttaaataacccttggttaggttacagagaaactgcttactcagaaattttattccatgttgccaatcacggaacttatcatcagggcagcataacaactatgttaagacagcagggctacgcttcggcaatgaatgaccttgcattatattggtatcaggattagttcagagagtacttgcaaaatgcataaccgccgaatgatctgtagagcttcttttctgaactaaatgacaaagtctcattcagtctgggtggggcgccgagcaagaatcgagatcaaaggctgccgtatcattcccggcagccttaatgattaggaagtaaaatcgataaccatgcggccggtcactttaccttgctccatttcttcaaaaatatcattcacatcttcaatcgggcgttttgtcactttaggtacaactttaccgtctgcagcaaattgaaaagcttccttcaggtcttctctggtacctactaatgaacctacaacctgaattccatctaacacgagacggggaatatctaaatccattttgtccaccggtaaaccgacagcgactacgcgagctcctgcttttacaacatcaatcgcttgattgaaaggggttttagagacagccgtgatgaccacagcatcaagccctaaatcgttagtcacttcttttgctttagcgacggggtcttcgtttaaactgtttacaaccgcgtcagcgcctaagctcttagcaaaattcaatttttcgtcgctaatgtcgaacgcaatcactttagcgttaaagacattttttgcatattgaacagccaagttgcctaaaccgccgactccaaatacaccgatccattgacctggcttaatttcactgactttaacggctttataagttgttacacctgcacaagtaatgctgcttgctgctgcaggatctaaattttccggcacctttattgcataatcaaccgctacgattgcttcttcagccattgcgccgtcaactgtatagccggcattttttacatcgcggcacaaggtttcacggccagttaggcaatattcacagcagccgcagctttcaaacatccaggcaatagagacgcggtcgccctttttcaaacttgttacaccttcaccgatctcagttacaatgcctattccctcatgacctagagtgacgccagtaacatccccgaaatcagcatttttaacatgcaagtcagtatgacatacaccacagtattccattttaactttggcttcaccatgtcgtaaaggacgtaattctttttgtacgatcgctatacttttgtcttttgttgctactactgctttcaaatcatgcacccctttcgaatattggcagaaaatttttacttatcttacaatttagcacactgctctccttttgaaaacccttacatttttttgcggacaagtgtctctacaaaagttgagggagctatgcatttgtcatccgaatggtgtttaaatggggggggtagtctccaaatgcacagaatgctttgaatttgtggtcgtaatctttctgtcgatatttgacttgcactgcagagaattacactggcaggatatgattttacccttagtaaaaagaatttcacggataatcatttgaacttgagcgcggctgataaggtgaatggtgatgcaaacagaaatcattacttattgatcacaaaaggagccggctgcggagatgtgtggattaaaggcttttacggattcgaacatgatgagccggatgcagattggtgagcgatacacagtcaaggtatttccttgaccttttttaatggcaattaaaatttggatattaagatagtgaattgatgatctgccaaaaaaacatagatcttttaaagtgatggatatatactgattttaaacaataggaaaaaaatgagaaatgtatttttataaaaagcaggtgaactatatggaagcagcgtcttggagcaaaagtcaaagctatacttacacattggctttttcaagtttgtcgtatggtttgatcttcgggctatatatgtttgtatactcgggttttgtgccatttgcattggttactgtagttatcattgctttttatgcatttattacttactttttgtttgctgttcctgtgcaactatggctaagaaagaagcctaaaaagtttagtttggttcatcttttcatttatacagcagtcgcttttttagccgtgttcttgttctggcacatagataatccgtcaattgatttcacagttttcagaagtttcatttattacataatgagcattgttgctgcgttcatatattggttctgggactctatatttctgagaaattacaatgttcactccaagtaaagctgatgtttccaaaagaaagcaggtgaggaaaaatggaatacattgagttgactagggacaatattaatgacaatcatatttgctgtgcattaggtgcgaaacaatatgaggatgcggtaaatgaaaagaagagctggctcaaagatcggatgattgatggcttggtgttctatcgcctaaacgaacgggcaaaagtttttattgaatatttacctgcagaagaagcgtgggttccggtaagcgcacctcattttatgtttattaattgtctttgggtctcaggtaaatataagaataacggacatgcgaaacacttgttagaaaaatgtgtgtcagatgcaaaatcccgcggtatggatgggatagttcatatagtggggaagaaaaaactcccttatttaagtgataagcatttctttgaacatatgggatttgctgtgcaagatgaagcagaaccctattttcagttgatgtcactgacgtggaataaacatgcatatcctcctgtatttaaaaaacaggtgaaaagtaattccgttaataatgagggaatcacaatattttatacagcccaatgcccatttgcagtcggattgttaaaggatttaaaggaactgactgaaaagaaaggacttcattttcaggcccggcgaataacgtcaaaagatatggcgcaaaaatccccggcagtttggacgactttcagcgtgttttataatgggacatttctcactcatgagatgatgagcgtgaataagtttgaaaaaatactcaataagcttttaatggcttaactttgttttaattactattgctcgtttctatattcgatactgagggtttttcacgaaaattgttcagtactttacatgcgggcgccaaatgaatgattattgtttttgacaaagatgataacgtccatcattatagtaaaaatagattgagataagttcttcaacaaacgaataagatctgttgaagaagttcttttcaaagatcgataacaatgaaacaggagactgcaaatgcaaaaaattgaaacccttcgcttaattttaagaaattttaccgagagagatgcgcaaggtctgttggaatattctgcacatccgagagtgaattgctttcttgatgacagaatgtctacgttagaagaagctgccgtaaacgttcaaaaaagaagccgagatgactcttatattgcagtttgtttaaaagacagtaaagatctggtcggagaactattttatttaaaagaagagccagatacctattctgtttgttggaatttcaatgcccgttttgaagggaagggatacgcaagtgaaagtgcgaaggctttctttgagtatctctttatgcaaaaagaagcaagaaggctttatgcatatgttgaagatgataactgcaggtcacaaaaattatgtgaaagattaggaatgcgtaaagaaggttattttcttgaatttatttcatttactgcacacgaggatggaacacctaaatatgaaaacacttaccaatacgcattgctaaagaaagaatggttaaaacaaaaacatagttaatagaatttgtggggaaataatctcccctttgtcgaaaaaaccttgctgaaagcaggtttttttgtatttaagttaaatacttcattaggttaccgatcataccaatggattatggaattgaaaaaagtacttagattagtaacgatcaaaaagattaagcttgaaggttgggaaaaacataaaattcgttatagcaacgttgtaaaattggagagaggatgaatgtgatggacattttgcagtttaacgacagaaggagcgggaagtaatcgaatcagcaatgatgcgctcgagaatggaaaagtggttgataatcaaaatgttaaaagctgttcagaatgaaatcaccagtttgattattggaaatccagaataactggtggacgagttgtaactgaaactgataatcaagtgctggatatcatcaaacaagcatacaatcttggaatggttgcgaaagataatatgcttttgagaaatcaagcaattaacgcttataaaacatctatttaattttaaatcggcgtttcaggtgaactttatatgatttctgttttcgtaaacatatttaaaaacgaaataagaattaaaatatgcagacaaagcagcgaagcataacgcataaaaggtgttatcagatgtatgaccgtgcctaaaaataaaacttatgaagaaaggaactctaacgtgaaatcaaatttagtttcgtttctattagcattgtcaggatttatattcagtatttatatgcagtcaatggcttactggagcaatgactctatgctgtggtattgggtcggtgcggttttgtcgtatctatttgctgcaggatcaatggttactctgattcttaacaaaaacaaagactcaattctaacaataagttgtctcattttaatgattgtaaccgttatgcttattttcgtcacaactttttggacgacttttatcattattgcatggcaatctgggatgtgaagctaaggggaatatgatcttcttagtattttttttattcctgggattagaatccctttttattattctttcaaattaaatgtaacaattctaatattcatacgttctaaatgataaaggcgggatgtcatgaaaaaacgtaaagtcattaaaacattgctggttattatcactgttctcataatagcagccggatttgcactgttttctttaatttcaggagaaaaagttaaatatatcggctatagccaaagcaagacgtgggaagcgtcaatcgaaaaatcaggcaagacctctatcggccctaactatttcttgaatttgtattacagaggtaataaagtgaatgaaaagaacacggtgattaagagattaacattatttgttgacggccggaaatatggtgaagataaagactatcatctttcagaatacaccggagagaaattagaaggcggcggaacgggagaagaccatattcaaacgtttgaatatatgccggaacatgaagtaatcggtcatgaaatcactgttgaagcagcatggaaaaccgatcatgagtcctattcagaaaaattcaacctgaaaagaacgcattggtatgactgaaagaataaaaagagggcggtataaccctctttttgaccagagcctttatttttgactgtttttcctcgatgtgctgaagtcgataaaagaggcattggagccgataaaattacttactaagacatacataaagaaaccattgacagctccctgccggcatccgtaaaaaagaatggataatgagataagcaatacagccgtaagcaagtctgcagccagacctattttacggtgagaccggaaatattctctcaatcttctgatgttgttcaaagcggacacctcttgatgcttatgtataagaaaataaacccattgaaatttatgtaatatcaatgaatagggttggaaacggaggggttcaaagttggggcgatcttgtgtaaaagaaaggatcaggatgaatgtgaccagcatccaccctgatcaatggggttcacagtgttccatttcattgtattccaatcggaataatattacaagggtgaaaaagaaataagcggaatgttttcggcttcttctgcctctggagcgggaaaaggaaagtgagatgtttgaatgaaaataaatgattatctgaaggaaaggcttccgactttaaaattagtgtccggcgtttatcatcaatgggacgtgggaattctctcggcggcaatatgtatcaatttaatgaaagcggtgctttgaatcttgagtattttcagcttgttcatcatcaaaccgccgcatttttcaatgagatgtttgaacatagcgatgacatgttccttgttgccaacgtgtataagcacaaaactcaaggtaatcacgcgagaaaattaaaggtttatcagccgtttctgaagtgtaaggatgatttatatcggattcaagtgaagacctgtccatgcccggtcgaagaagaatatgaaatgcagcagttttctttattatgtaaacggaaagatctgcgtatcccccaattacttaaggcagccgtccacgaagattttccgctgaagccaaggttcgggggctgttccgttgggtatcctgatgttttctttgtgaatatgacaaaagatattattttctttctgtatgatgacagagggtgtgaagtcattgctcttgatgccggaagaatacgaaagctttatgatcaatatcacgattggattgaattggactgaaaatgaacacatgaattcgaatccgcttgtgccggctttgttcttgcctagtccggctgcatgagtataatgggcagaattgaaggacgcctgaaacttttttttctctcataccgaccttctgcatgttaagcttctgtatttattttgaacgaattcctatttgtaaaacggctgaatagaataacataaaagcttttttacacagtgcaggaggagagaaatgtgagggctgaacaccgtgattgtatggaaattggaatttattcatttgcagaattatatcccgatcctctgacagggaaaacagtcagcgcaaagcagcggatagatgaattgatgaagctggcgaaactggctgacgacgcagggcttgatgtattcggtgtaggcgagcatcatcgtcttgattatgcggtatcttcgccgccggccatcttatcagcgatttcacagatcactgaaaatattaagctgaccagtgccacgactgtattatccaccgcagatcccgtccgtttatttgaggattttgcaacgcttgatctgatttcagacggccgggcggaaatcattgcgggacggggcgcatttttagactcgtttcctcttttcggttatgacgtaggccattataaagaactgtttgaagaacacattgacctttttttaaaattaaattccggggaagaatcggttacctggaaaggacgttaccggccgccgctgcgcgaggcagaaatttctcctcggccttttcgcggaagcattccgctatggttaggtgtttcggggactccggaaagcgcagaacgggccgggcgtgcaggtgcggggttggcattagctgtactgagcggtgatccggtgtcatctaagccgcttgttgacaaataccgggaagcggcttctaaagccggtcatcctccggaaaatgtgaaggttgccgtaaccggacatatgttcatttcaaaaacgaatgaacaggcaatacaagaattttatccgtatcattcaaattactggtctcacgttcattcatatcacgggatcgatgagcctttaacgaaggaagattttgagcgggcgtccggaaaagaaacagctttatttgtgggaagctcacagcagatcattgaaaaaatcatgcatcaatacgagttattcggacatcagcgatttctcgcgcaaatcgatataggaggtatgccgtttaaaaaagccgcggaaaacatcgaacgattagcagcggaagtagcaccggttatccgaaaagaaaccggcaaatccagcgaatgaagttctgagcaaaaggggcggccggtcaatcgcggattcgacaacagaatcggcccggctttttctttatgattataaaaaacaaagggaaaagcgccaacctcattgctttttcctatcaagaaaaggaaggtcatttcatcctccatcgtgaagtgtatataccgaaaggtttttattaacaaaagagggaggatgatgcagtaatgaagggtttagtcaaagctgcagttttaactgttactcttggtattggaggcgctttttattcaagtgatgcatctgcgcacgggtatataaaagagcccgtcagcagagcgtacatgggagcattagagaaacaaacattgggctggacggccgctgcgcagaaatatggctccgtcattgataatcctcagtctgtagaagggccgaaaggatttccggccgcaggtccgcctgatggaagaattgcgtctgcaaatgggggatctggacaaattgacttcggtttagacaagcagactgcagattattgggtaaaacaaaacatccgcggcggttttaacacctttacttggtactacacggcccctcatgcgacatcaaagtggcactattatatcaccaagaaaaactggaatccgaataaacctttgtcaagagatgaattcgaattaatcggaacggtaaaccacgacggttccaaggcagatacgaatctgactcataagatttttgtgccgactgatcgaagcgggtatcatgtcattttaggggtatgggacgttgcggatacttccaatgccttctataacgtcatcgatgtaaatcttacacaataatctatgaattattgatcggctgcatgttgatacatcggccgatctttttagttttaatgtgtgaatgagaaggggaaaaacagcagagcgccataaacatttcatttatggcgccgtacgatcatggaggtgctgctgacatggatgcggaggtaagaggattcttaataaccgccgaggaaagaagccccaacgatgattaataaaatgaatagcaccacgattaacgcaaaggagctaccataaccacctgagaatcccatataatctcacctcctaaagaggattaatacatattatgccgaaatgataagtttgatagggatgctagtttactttttgaaaaaaagtttttttagtctgcatatattttcttctcacatttcttttaaagggggaccgtaaatgcttcctgtaatagaaacggacagacttattcttagagaagttgaaaagaaagatgcaaagcaaatatttgcttgtttttcaaatgcaaatgtaacacgctattatggtttggaaccttttgattcaatggaacaggctgaaaaaatgattggctggtttaaagatcaatatcatgataaaaagggaatgcgatggggaatcgagagaaaagatgcgaagggaataatcggaactattggttttaactcttgggtgcccaagcataagcgggcggaggtcggttatgagattcatccgaattattggaggaatggctatgcttttgaagcgttggagaatgttctttcttttgggtttgaaaagcttgggctgcatcgtataggcgctgttgttttcattgagaatgcagcgtctcatcaattactgataaaggcggggtttcaatctgaaggaattttgagaagatatatgtatcaaaacggactgccccatgatacacgtgtatattctatactgaatgagatcgttaacgaataaattgaaaattcgtcgttttgtcaggtgttctgtggtataaaaagccggtgaagacttattgcagaaccttaaaattgattcgaagccataaagcatttttttgctgtgctttctgcagacggagtttgattgtaagaaacgattccgataatcactaacaagatgatgaacaccaatatgctccacaacactatttttaaagactttgacatagtataccctcactttgaaagactttaccggggctgcgatcagagcccgcgcttcaagtatagtcgttataacggtgaaaaatgtgcagtccagttaaaaaaacttgcgggcgctgccgcaagttttctccgtattaaggtctgtggaattcaatatgctgattatcacgatcgaaccaccctctgaatgcccaattgatccagcccccgtctcctttgttatcgaaggacccgtcttcgaagacccagattccgtaagtaataccgtcataaacggctgatccgtaaaactgaacgccgttaaagcggtcttcatattcttgatttaaattgaacaccatgacgttgtacttctgtcctgatgcgtaaaatgttgtttccatgacattttttacccagccggttcggttttgatctgacttaaccgcttcagcaatgcgatctgagattccgagaacatctacgtttacgttcagcccggcatcaacacctgctgcttttacgttttggtctgctgttttggataatttactttctaacggatttgcaacgggtgaaacgtgaggcgcgtttgcgtgttcagactgactggctgctgaggcactggctgtgaaaggaattgttagagataaagctaagcatgatccgactatcgttctggcgattttcatggctatgacctcctgaggaaatttttaaaaattgttgcaaattcatggtatcgcagaaaaattgagcaagcaaagagtagattttctcaaaagtcatgtcattctatttgtgttgttttctgtaaatgaaatacttttcattaggcgaaaagggaagaaaataatagagtctttttatgtattgtgataggatgaccggattttgggtgaaaatagcccggagaaacgccataataagaaaaacacccggagtttaccgggtgtaaaaagtgttgatatgtcaagttagcagcattttttacattttttgcattttcttttataaacaacgatgtaatcataatcaagatgctttttatcttgtttcttctttttttgtttaggctgttttgggtggtgatcataatgtccgttcatatccatatccatatccatatccatatccattcccatatccattcccatacccatatccatactcatattcctccttttttcatctgacggtagtattctatgacagaaagcatggatggcttggacaaatgaaacggtatgctgaaaaagaggcatctcattcggtataaaaaacaggatcatacccgcccgatagaaaagagaggagatgatcctgatattgagaccctatttgataaccgcaattgcaatgccgtaccctttttcagaactgtataaggccgtcagtttcaataccttccagccttccgcggctttagtcccgattccgttatgggccgtgatataatctcccgggctgaccgtaccgtcgacccgtacgtaatgccggccgttgagtccgacaatgtgccattcgtctctggccgctcgtgcttcatagtcagcttcaagagccggactgcagtctgggttttgtttcggcacgcgtaccgtttctcctgtttcctcgtcagtcacattttcgtatatgaaaccgccgaactcgtttgtcaaaaagcggctttgccatccgaagcttgcggctcctgagataaaagcggctgtttctgaaatgacgccgagcatgtaatctccgacgtgagccgattcaattttttcgcctttcactgtgacgattgtcccggcgggaattgtctggccggttacactttcaaagtattctccgtaccctgacagggaagaggtgacagctccggcgaacgtaccgtggccgcccgctgaatccaatttccatttgatggactgatgccctccggcaaccgtgtatggttcttccaatgtaatgctttctgatgacagaatcgttctggagactttgctgcccgtaatatgggcattgtttgaagcggcgataaatgcccttgaaccttcagaacttgaacctccggaagagctgatgatcgcatttctgtcacctctggccgtaatatcgcctgttcccgcaataacggcgcttgtcgggttgaatgcaaaaccggagctggtcgcgagctgtgcgcctccctttaaattgacggggatctgctcataagtctgtccttttatagatgcggccgcgctgtaaccttccgcttgcaccccgagaatgacggcctgactgttaggggacgtaattccgacggaaccgccgtctccgatcatcgtaccgttcataatatttacgttatattggcctccgccgattgagatgcctttaggagatgacttgtatatatcaaaatttaaaattttaacataatcggttttatttgatccgccggatatattgatgtcaacacctgcttgtgtaaagccgcgtattttaatgccgttgatcgtgatattttgactgcggtattgaagagccactactggattcccgccatagtcgtatgagggatcaccaatagctgtgaatccgtttacattaacgtttttataggcagagatgaccagcgccctcggggtcacaccgtcatagagagcattgaataccggttcaatcgcggtgcaatcggttaaagtaacatcataagccgtcgtgctttcggggtctgaggcctgatgatggccgatatgacgaatatcaaatgaacgtacatcacgatacgaaacatgaccgataatatgaacattttgagaagccggccacaggctgtgcgcctttacctcaatcccgcggatatttccgctcgtatagttatttaaaagccatacatgtttagagccgtcgtcaatttcaatgccgttcgagtttgcgctgccctcagcatgctctgtgccgcgggggtttccggaatggcagttggagatgaaaatatactcgctgtaatgggtggtaatgccgtcgtctccggcgccgtatgccacacagttatcaatccatatatatcggcagccgtctttcgtccattctgtttcaggcaaatgatcgtaagtcggagatgtaatatcaataccatggagacccgcgttaaccgtttcaacattcttaatccagccgtattgcacattagcaaacgttaaacagctggaaaactgtcctccggggttcctgaccccgcattgacgatcaggattccagtctaaagtcatgttttcgacaaaaatattacggtttccattttcgtaatcatcgttagtaatgacccattcgaatgcgggagtgtcctcatgaagcttaagcacggtaatcccttgtccctcaccggaaatggtagtccatgaggggagttttatcccttgaaccaaaaattctcctgcgggaacatttactttgacccggccgttcccgatcgctctccgaaaggcttccgtattgtcccggccgtcagggatcgctccgtagtcctccacattcacttcccgggtgattttattcataagcatttcgtattctgtatcaagccgttcttttaaaagtgaggtgaccattccttccgccgtcacccgggcatctgcgatctcaagattatcatccgttgcggaatgcttaataaaattctgcatccttgctttgagatgctccaattcagagggctgtgcagggcgagactgcaatggggcgtttaaagacggatcaggaaagtttttaaattgaaccattctaaagacacctctttcttttgatataagcgcctgaggcaggggacagaaaagagtcgtgcgccctttaagcgcttattcttcaaattctttattcagaacgaaattccttttgaaaccaaggtgaaattttaaaaaagctctgttgaaagaacggatataaagctttgtattattgtaattgaagctgtcatgtgaaaatggaggaaaaactgataggaggggccctcattttaggtttattctcattggcttcgcagtgcttcctcttcggctgcatatacaccaaaatcaacatttttatcagttaaatggtataatggggcacggattggtcatcaatacgactgaaatagggaagcaaaaggagcagcgaaaatgactttacaaatcaaaattaaatattcagatgatacgcaaacgagaatcagtaaaattgaacagggcgattggattgatttgcgggcagctgaagatataacaatcaaaaaaggtgaattcaaacttatcccgcttggagttgcgatggaactgccggaaggatatgaggcccatgtcgttccgcgttcaagtacatataagcatttcggtatcattcagacaaattcaatgggagtcattgatgaatcttataaaggcgacaatgacttctggttttttcctgcattcgcgcttcgggataccgacatttccaagggggagcggatctgccaattcagaatcatgaagaaaatgcctgaagtggagctgatcgaagtagacaagctcgggaacaatgaccgcggcggactgggatcaacaggtacgaaataaaacgaaaaaagactgcttaacagcagtctttttttttatggaaacagcagttacattcaatttgtttcggggattcttgaattgggaaatcatacgtcacgttcgaatttgacttcgaaataaccggccgctccgtaaccgtctatgccggagcaaatatttgagccggacgccagcccagctcagcatattgataaaatgatttcccagcagtcctcactctcctccaaaactaaggagaaggttttcatttttatcatttaagctttccgtctctttgacagaaagacttttttaggttaaaggatagaggttgttttgatgtttttattcttcaagatgaacggaggttttgtccaacgtatataatattgtgacaaaagtgtaaacaaaagaaaggatgatgttatggcaaaaagggttagaagagtagaccgtaaagcagctggcaaagaggcagagcagaagaaaccgtccaaagtcaccctgttctgccgttcgcttcaaaggctgaagcatttgtattgtaacataaacatacaaatgccatcaataaccaaaaaagggattttagttttaattttaccgtttttgcttctgccgttctttcgggctgatgccgcttcagatatttacggcagtttcgaggaattaaagctgaatgaagattcttccaatttttccatttcaacgcgagagcatgaccctgctgtcctcatattagctatacacggaggaggcatagagccggggaccagtgagttagccagagaaattgccgaaaaccggagtttatatttatttgaagggttaaaatcagccggtaatgcggctctgcatttgacaagttcgcatttcgatgaacctaaggccgtgcaaatggtgaaagagcactctcatgtcatttcattgcacggttacggcagtgacgataaaaagataaaaatcggcggtacagacagagaacgggccgaacttttgaccgatgtgctgaaacggcacgggtatcctgccgttcttcttggcataaatgataaatatgcaggcgtcagtccgaacaaccttgccaatcaatcttcatccggattgagtattcaaatcgaaatgagcaccggcttcagaaaatcactatttgacacttttacgctgaaaagcagagcatccacacaaaacgggaccttttaccaattcacaaaaacgatttctgattttatcagtgacaaatattaataagcacgcctattttgtcggcggggctttttcttttgaaatttatgaaactttaagttcttaagatcgtatacataattgacaggatgaaagaaaagaggtgggcaaatgaaagtgatgatcgggtctatcattcttcttgtcatcatcggattcggtttatggctgatgcttagtccaatctttaaacaagtgggaagcggagccaaaaaattcaaaaagtcatgggaggaagaagatcagcatgagcgaaaataagcgcggaaacacaaaaaaaattatcggcggtgtgattataggtgcagcccttttaattgcgggcgttacagcgtcactattcattgaaaaaataccgaacggttatgtcggggttgtatactcaccgaatggcggggtaaaatccgacacattggaccaaggctggcacttagtcggattatttaataaagtaacggaatatccggtgcgtatgcagacagtgaataatgaaaatataaaagtggcaacctcagacggtaaaaatatagaaatggatatcgcttacaactatgtcgtgcagcctgataaggtagtcgatctgtttaacaaattcggagcggtagacgttgaaacgattgaaaatacatatttaaaaacaaggctgtgggatgcggcgcgaaaatcaatcagcaaatactcggttattgacacatacgggcaaaaatctgcagaagccgctgccgatgttcaaaagagatttgctgatgatatgaagagtcttggatttttaattgatgatctgacgcttggcgtaccgaagccggataaagccacacaggaagctatcgatgcaagggtgaagtcttcacaggaacttgaacggacacaaactgaaattaaaatagccgaagccgaagcgaaaaagaaaaaaattgaagcggaagggatcgctgattataacgaaatcataaagaaatcaatgtccgatgagatgatcaaatataaatggattgaaaaatgggacggaaaaacgccgaaagcgacaggcacagactcactgctgcagctgccgctggacgatcagaagcaaaaataaaatgagaaggaggcgattgcctcctttttatgttttttcctgagggtctttttccggcactaattcttcagacgcctcggtttgatagctccatagcgtgctatccgtctctgttgtgtcctgataatcttcgggaagtacatattgctgcaaataccggtgaaaaaatgcctcaaaaacagaaatgcaaagtgcagagataaccgatgccgcggcaggagagacattaaatccgccaatgttcataaggaatatccataatataatgaatgaaatcccgaaatcagctgcaacggctgtgaaattgcttgttctcggcagaatcatgcaatcacccgcaaaataagtgattaaacttaagatcactgtaataaacagaacgtttaaaaaggttacttggtacataagatccagaacaatgtacagtaaagcaagtgtgagcgccgttttagaagcgaaagcaattacgtgtttcatttgaaccaccttcgttatttcgtttagtcttcattgtaagcaatccgcaaatttttaaactggtatatagtggttataaagcatacgttttaataaaatgtgaatagacatcacaggattcacaagttaaaatatgtaaaaagggggatgcaaatgaaaaaatactggatatgtattgctgtttttttattatgttttagcggcatacactcagctaaagcggctaccactgaattcggatcaaaaacaagcttcactttggagggaaatgcaaaagagtttcatattgaaaatccgggggctgtagctgccgacgattactttttaggatataagttcaccataatgaacaactcttcatgcggtttaagcatgaaactccagcggatggcgctgaacgggaatttttatacattaagttctaaaaactacagcggcagctggttaaacctcagtgcccaggataaaaaatcaattgatccgtatcacaaatacagaattctggttgaaagttcttcaaacgtctgtggccccgtctatattaaagggttttacggtgtagagtattatcattttgattgaaaatagatactcgctaaaggcagcgggtttttttatatttaaatataacttattgtactatgcactaaatattcatatataaattttaatgcacccgtccaaagaaaacataaacaaaagtaaattcatcacgcaaaaatatacaaagttgaaaaatgaatgaaaagtttctcgaggtaaacattattagttgacttcaaaagtgtgatgtcggataataagaatgtaagtttttcctccttagcagattcgtttcttaagccagggcgaatctgctttttttatgcaaaaaaacccctctgtaaggggttttttacgataaatgaagtttaatagaattaatgtacggctctgaatacgccgataactttccccaaaatgcttacgttttgcaggataatcggctccatcgtcggattttccggctgcagccgcacataattgtcttctttatagaagcgcttgaccgtcgcttcatcatcttcggtcatagctacgacgatttctccgttattggccgtgttctgctgtttgacaatgacgtaatctttgtcaaaaatgccggcgtcgatcatactttctcccatgatttctaacataaagacatgttcgcccggaggaaccatccggtcaggaagcggaaaatactcgtcgatattttcaacagccgtaatcggaatacccgccgtcactttcccgatgaccggaacgtttacgacctggcttttcggaatttggacttcttcttcatccaatacctcaatcgccctcggtttagttgggtcccgtctgatcaggccttttgtctccagccgcgccaaatggccgtgcacggttgaactggaagccagtcctactgcttctcctatctctcttacagaaggcggatatcctttcgtttttacctcttctttaataaaacgcaggatatcaagctgcctttttgatagcttcgtcatatttcgcacctcaaaacgtcgattttaagtagattatagcatgattttcctgacagtacaaacataggttcgaaaaaaacgattgacagaaacgtttgttcgtatatactaaaaggtataaaaagcgaacaaacattcttatcggaggttgtttacatggcgaaagaatctattatatttgtcggactgtttactgcgattttaagtgccgctattttacttgtctcatgtgcgggaaatgatcagtccctcagccaatatgttaaaataaaggttcaggacggcgatacactctggtcacttgcggatcatgtagcagaaaagaaacacattaataaagaagatttcattgagtgggtgacggagaataatcatctccaaactgctgatataaagcccggagacgaacttattcttccggttaagaaaaagcatccggccgtatatcagctggccattgtcaattagagaggaaagagagaaatgaaggcgctcatttatgcccgcgtaagcacaaacaaagaacagcagcaaacgtcattaaaaagacaggaagaggagctcagtgagattgctgctgcaaacggcatggaagtcgtgaaagtcatttctgagaaagccagcggttacgaaatggaccgcgacggagtatttgaaatgcttgatgaaattaaaaaatcacatattgacgcgatattggtgcaggacgaaacgagattgggaagaggaaacgccaagattgcgcttttgcattgcatttacagggagaacgtaaaaatatatacgacggctcataaaggtgaactggagctttccgaagctgattcgatggtactcgaaatcgtcagtattgttgaggaatatcaaaggaaaattcacaatatgaaaatccggcggggaatgaaaagagccgtgaaaaacggctacaaacctgaacggaatctgaaaaacagacatgaaaacagcggaaaagaaaaaaaagaggttccggtttcggaaattatcaggctgagagccaacaagcttacctttgcagaaatcgcagcgaccttaaggggattcggctacgatgtgtccaaagccacggttcaccggcggtttcaggaatatatcgcagacacagaaggcagctgacgcgcatcagttgtaaaaaagactgcgttttagtagtatataatcaacacgcaccaaaggagcttattatgatttctaaagaaaaaatcgcaagaattaacgaattggctcaaaaagctaaatcaaacacgataacggatgaggaaaaagctgaacagcaaaagcttcgccaggagtatttgaaaggattccgctcctcaatgaaaaatacgttaaagagcgtaaaagtgattgatccggaaggcaacgatgtcacccctgaaaaattaaaaagagaacaacagaaaaataatcttcattaaacagaaagaatacggcaatacgtattcttttttcgtatatactaatatcaggatgtgctttacgacaattttcaacaagtttatctcaaatttaagctgaaagagttgagaaaaagtcagcatcgctttatgatgaaaaggtacaacaataaggaaggggattataatggatacaattgaaaagaaatcagttgccaccattcgtacactatctatagacgcaattgaaaaagcgaattccggacatccgggcatgccgatgggagccgctccgatggcatacacgctgtggacgaaatttatgaatgtaaacccgcagaatccgggctggtttaaccgcgaccgctttgttttatcagcaggccacggttcaatgcttttatacagcatgctgcatttaagcggatatgacctcagcattgaagacttgaaacagttccgtcaatggggaagcaaaacaccgggacatccggagttcgggcatacagccggagtagacgcaactaccgggccgcttggacagggtattgcaatggcagtgggaatggcaattgcagaacgccatctggctgagacatataaccgtgattcattcaacgtagttgatcattatacatacagtatttgcggagacggcgatttaatggaaggcatttcttccgaagcagcttctcttgcaggccatcttgaattaggccgcctgatcgtattatacgattctaatgacatttccttagacggcgatttagaccgttctttctctgaaaatgtaaagcagcgttttgaagcaatgaactgggaagttctttatgttgaggatggaaacaacatcgctgaattgacggctgcaattgaaaaagcgcgccagaatgataaaaaaccgacattgatcgaagtgaaaaccaccatcggtttcggttctccaaaccgcgcgggcacatccggcgttcacggcgctccgttaggacaagaagagagcaagctgacaaaagaagcgtatgcttggacgtttgaagaagatttttatgttccggaagaagtatacgggcatttcaatcaagctgtaaaagaagcaggctcgaaaaaagaacaggaatggaatgagctgttcgcggcttataaagaaaaatatcctgagcttgctgaacagctgtcactcggaatgaaaggcgagcttcctaaagactgggatcaggaagttcccgtttatgaaaaaggcagcagccttgcttcccgcgcatcttcaggtgaggtgctgaacgggatcgctaagaaaattcctttctttgtcgggggatctgctgaccttgcgggttcaaataaaacgacaatcaaaaatggtggagacttcacggccaaagactacgccgggaaaaacttctggttcggtgtccgtgaatttgcgatgggcgctgcattaaacggaatggcgcttcacggcggcctccgcgtattcggcggcacattctttgtattctctgattatttaagacctgccattcgtctggcgtcattgatgggactccctgtcacttatgtattcacgcatgacagtattgccgtaggagaggacgggccgactcacgaaccgattgagcagcttgcttctttacgcgcacttcctaacctatctgtaatcagacctgctgacggaaatgaaaccgcagctgcatggaaggttgccgttcaaagccaagatcatccgacagctcttgtattgacacgccaaaacctgccgacgattgatcagcaggctgaagaagcgtatgcgggcgtggaaaaaggggcttatatcgtttccaaagcccaaacggaatcacctgccgctcttcttttagcgacaggttctgaagtcggacttgcgatcgaagctcaagcgaaactggctgaagaaaacattcacgtatctgtagtcagcatgccgagctgggaccgctttgaaaaacaatcggcagagtacaaaaacagcgtgcttcctccgaatgtgacgaaacgtcttgcgatcgaaatgggttcaagcttcggatggggtaaatttaccggtcttgaaggagacgtgctcacaattgaccgtttcggtgcttcagctccgggagaaacaattatgaaagaatacgggtttactgcagaaaacgtggttgaccgcgtgaaaaaacttttaaacaaataacgagacaaaagaggatgagtcaaatcatcctctttttcctgtttatgcgacaaaaatagaaggggcggcgtaacagtaatagacaattctttcttttctccttttgtataatagaaagcaataacgaagcgctgtaaaaggggatgaggaaatggaacgtcattactatacgcacctgataaaggatgagtttgcgaaccactacttcgggcgggaaacggctatgtttgagttgtttcgagactatcattggacagatctgacaccccaggaatatcaaatgacagaaaagcaagttcaatatataacggaaccgattccggtgatacatatgcatcagcgtctccagctgcatttaaaccgaatgagttacagccgtttggattccatttatcggcttacactgcccggagaaaagggccgcgccaccttcatgatgaaagacagtttaattgagattgcggcttcgggagattatgaggcggaaacgattttctttgagattctgcgtaaaatcagcccctgttttcttgcaatggatttcaagacacggcgctacgggtggttaaatccggtcagagaaagaaattttgtctaaaaacgaggaaaaagagatgtaaatgttgtataatagcctttggtttagtacactttaaactagacaacatgaaggaggaaataaaatgactttatgggttggcatcctagtgggcgttgtcgcattgctcataggtgttgcactcgggttttttattgctcgtaaatatatgatgagctatttgaaaaagaatccgcctattaatgaacaaatgttacgcatgatgatgatgcaaatgggaatgaaaccttctcaaaagaaaattaatcaaatgatgaaagccatgaataatcaagcgaaataatacgtacagattatgatatagatatacatggttataaaaataaaaaacccggagagggttttttattttggcgtcatgtttcaccccaactgccggtgtgcagttctttttgatattgtatgagaaggtggtcaagctcctggctgagttctatcgtaatgtttgatgtcattccgtttgtcatgacgattttaagcagctctgcccgttttttttcaatttcatttaatagatgctctctaatcacagggatatatcctttcatacataaatctttcacctgagtcgctattattatatccacatttatactgtttttcaaataagaaggagtataatatctcgatgtcaaattaaattatataagctttttctataaaaagtaatccttctcgggaaagtgttaaaaaaatgaaatgattttgtcataactcgaagggagtgtgtcatcgtgagttttaattactttctgacgtttggggccggatttttgtctttcatttctccatgctgtctgccgttgtaccccgcctttttatcttacataactggtgtcagtatggacgaggtgaaaacagaaaaggtgatgctgcaaaagcgcggcctcgtgcatacactttgttttttgcttggtttctccgtgatttttatcgcattgggatatggaacttcgtttatcggcagtttttttacccaatatcatgaagcgatccgccagtttggcgctatcatgctgatccttttcgggctgattactgccggtgtgtttcagccgaaattcatgatgaaagagcggcgcattcactttaagcgccgtccggaggggtttatcggttcggttctgatcggtcttgcgtttgcagccggctggtcgccgtgcagcgggcctattttaggagccgtgttttcgctggccaatacaaatccttcttcagcagtgccgtatatgtttttatatgttctcggatttgcgattccttttcttgttctttcattttttattaccagaatgaattggattcgcaagcatcagctgcttatcatgaaaatcggcggcattcttatgattctgatcggagttatgctgttttttaactggatgagctacattctgatcgttctgtcaaatcttttcggaggatttacgggtctgtaacggattaataacttttgaactattatatacccttttgtttttggtacaataagactagttaatgttaaatatgtggaggggaatatgacacgagttttagttgtagatgacgccaagttcatgagggtgaaaatcagagagattctggaatcggcgaattacacagtggccggggaagcggctgacggtgaggaagctctggcagtatatcaaaaaatccgtcccgacctggtgacaatggatattaccatgccggtcaaaaacggtatacaggccctgcaggatattttagcttttgacccgaaagcccggatcatcatgtgcaccgccatgcggcagcagcggatcgttctggaagcgattgaattaggcgctaaagactttatcgttaaaccgtttgaagcatctaaagtgctggaggccgtaggccgggtaacgggaacgtaaacgtgttctcttttcaaattggttttttttatgtttttggagtatagtatatagtatcaaactccgtgcaagcaaaggaatgataaagatgatgattataatttcatccgttattgcagcggccatggcaatttccgtgatgatcgtcaggattaaatcctccgacaagcccgcttcacctaaaaaaataattctcccgccgattttcatgagtacgggagcgcttatgttcctttttccgattttcagagtgacgggcgaagaatttttggaggccattacgctgggcgtgatcttctctatttttctgattaaaacatctaaatttgagattaaaaataatgaaatctatttaaaacggtcaaaagcgtttgtgtttatcctgattggtctcttggttatcagaatcgctatgaaatccattttgagcacgacgattgattacggagctttaagcggaatgttttggattctggctttcggaatgattgtcccgtggcgcatcgcgatgtttttgtcttaccgcaaactttcgaatgaactgaagaccgctgatattcagatgaattaaaacctttccgtccgccggaaaggttttttatttgagcagagcttgataaggagtaagatcaatctgtttttcacggagatgcttttttaaaaattgatgatcacgcttaggagtggccagtatgtaacccctgatgattaaatcacggtttatttgttcagcttcctccgctaaggaaagttcaccgatttttccggcgattttcgctttggctacatcccgaaagagctccggcacgggggcgaccaattcatccaaaaacgccttgtcaccctcattccataagtgcctgcttttttcaatataatagtcctgccaatccagttctgaccggccgtcttctttcggtaagcgttttaaaaattttcgaaacataaaaaacccgccgatagacagcaatccgatcatcacgatgacccaaaataaaataaaccacataaaccagccttccagcattgttctatctcctccttactttaaccatattgtaaacgaagacagaatagaagaacacatgaaaaaaagaatagaaaaaatgatagatgtccagtcattccggttggtagaacatattctatcgtatagtgattctgctatttggccatgggagtttcactttgagggtatatgactgatatgaccggacaaaaaagccgcttccattgagggatgaaagcggcttttttatgttatagaggaaattgaaaggaaaaagaggcaggagtctcatttggctccttgttcatggagacggtcagaatatggttggtgaaatcagtgaaaatatgtttgtcattcagataaaaaggaagcatcatttgtttgtttaacgtccgttcaagcgttttaacagagagcataaactcattccccgaaagagtgacggttatcgcttgcacctgcttcagcgccgtcaggtcggcttcaatgatatattgacggcttgtttcatatagatcgatcggcagcgtctcgtcataccaagcatacgggtcctcgtaaaactgccgcagccattcttccgtatcatcaaattcttcagcgttttttgagtgattcatggaagcattcctccatattaaaaagccttgctataacgtatgcagaagctttgaatgggtgaatggcacaaaaaaacagacacggggtctgttttacatatcgtggcttgtattatgtttttgtcttgtatggttgcggtttttcacttttttgcttccgctcagcggttccggctggccggggttatggcccttcggagcatttttatgcatatctttactcgtatttttatttgtcatgttaaagcctcctttttaaggtgttccggctattggtttgtttttctttttttattgttctgccgttcttcttccgtcaggacgagctggtcattttctatataacccgcgcctttgccttggcttttcgcatcattcatgccgttaatgacatgattggctttccgttttaccatgatcatcacctcaacattaatatggctctttacagcccgttgtatgaggcggaaaatcggacaaaatttaccgaaaatcatgctgataagacgatcttattgtatttaataaaaacattgatatttacttatgtatgattttatactaagatgaaattgtgagaaaattgtgatggaatgtgaacattcatctaaagaacgatcttgatcattgaagggggattttggagaatgacaaatcagcaaaaagtcgcaacacaagacgttttccaagcaagaaaaacattttcttcaaatgggaaaacatacaactactattcattaaaagcattggaagacgcaggggtcggcaatgtttcaaaacttccttattctattaaggttcttttggaatccgttttgcgtcaggtagacggacgcgtcattacaaaagaacatgttgaaaatttagcaagatggggtactgctgaattaaaagatatcgatgtgccgtttaaaccttcacgggttattctacaggactttaccggcgttccggccgtagttgacctggcatctttaagaaaagccatggcttctgtcggcggagaccctgataaaatcaatcctgaaattccggttgacctggtcattgaccactccgtacaagtcgacaaagccggtacggaagacgcgttagccattaatatggacttagaattcgaaagaaatgcagaacgttataaatttttaagctgggcaaagaaagcgtttaacaattatcaggccgttccgcctgcaacaggtatcgttcaccaggtaaaccttgagtttttggcaagtgtcgttcatacgaaagaggaagacggagaacttgtgacatatcctgatacattggtgggaacagattcccatacaacaatgattaacggaatcggcgtcctcggctggggtgtcggcggtattgaggcggaagcgggaatgctcggccagccttcatatttccctgttcctgaggtcatcggcgcgaaacttgtcggaaaattgcctaacggaacgacggcgactgacttggcgctgaaagtcactcaagtgctgcgcgaaaaaggtgtagtcaataaatttgttgaattcttcggtcctggtgttgctgagcttccgcttgcggatcgggcgactattgccaatatggcgccggaatacggagcgacttgcggattcttcccggttgacgaggaagcactttcttacctgcgtctgaccggccgtgaagaagagcagatcgatattgtggaagcatactgccgcaacaacggtttattctatacgcctgacgcggaagagccgatttttacagacgttgtggaaattgatctgtcaaaaattgaagcgaacctatcaggaccgaaacgtccgcaggatttaatcccgctttccgttatgcaggaaacgtttaaaaaacatcttgtcagcccggccggcaaccaaggattcggagcggatgctgctgaagagaacaaagaaatttcatttaaacttaacagcggcgaagatgcggttatgaaaacaggggcgattgcaatcgccgctattacaagctgtacgaatacatcaaacccttatgtattaatcggtgccggattggtagccaaaaaagcggtagaattaggcttgaaagtgccgaattatgttaaaacatcacttgcaccggggtctaaggttgttactggatacttagtcaactcaggcctgcttccttacatgaaggagctcggctttaacctcgtagggtatggctgtacgacatgtatcgggaactccggcccgctttctccagagattgaagaagcggttgctaaaaatgatctcttgatcacttctgtcttgtcaggtaacagaaactttgaaggccggatccatccgcttgtcaaaggaaactaccttgcgtcacctccgcttgttgtcgcatacgcattagcaggcactgtgaatatcaacctgaaaacggatccgatcggtgtcggaaatgacggacaaaatgtttatttcgatgacatctggccgtccatggatgaaatcaattctctcgtcaaacagactgttacgccggaattattccgcaaagagtatgaaacggtatttgacgacaaccagcgctggaacgaaatcgaaacgacggatgaagcgctgtacaagtgggatcaggattccacttacattcaaaacccgccgttctttgaggaaatgtctgtagagccgggaaaagttgagcctttaagaggacttcgcgttgtcggcaaattcggcgattctgtgacgactgaccacatttctccggccggagcgatcggaaaagacacaccggcgggcaaatacctgcaggaaaaaggcgtttctcctcgtgactttaactcttacggctcacgccgcggaaaccatgaagtcatgatgagaggaacattcgccaatatccgcattaaaaaccaaatcgcaccgggtacagaaggcggatacacaacacattggcctaccgggaaagtgacatctatttatgatgcctgcatgcggtataaagaagataaaacgggtcttgtcgtcctggccggaaaagattacggaatgggctcttcacgtgactgggctgcaaaaggaacaaacctgctcggcatcagaacagtcattgccgaaagctttgaaagaattcacagaagcaacctcgtcttcatgggtgtgctgccgcttcagttcaaacagggtgaaaacgcggatacactcggcttaaccggtaaggaagtcatcgaggtggatgttgatgaatctgtacgtccgcgcgacttgctgactgtcagagcaatcagtgaagacggtacggtaaaaacatttgaagttgttgtccgttttgacagtgaagtggaaattgattactatcgccacggcggcattttacaaatggtgcttcgcgataaaatgaaacagtagcagaatgaacaaaggagagaaagcagtctgctttctctctttttatgcgggaggccttgagatgcttgcgaaatggctgggcggaatgttacttatcgggttgttagtgtatgcgggctggaacatttattctgtacaaaaaagtccgaaagaagggacagaagaagggatgaaagcccctgactttacacttgatacattgtcaggaaaaagcatctccctttctgattataaaggaaaaaaagtgctcctcaatttctgggcgacgtggtgcaagccgtgccgaatggaaatgcccgatatgcaggagctgcagaaagaatatcctgatattgcggtagcagccgttaattttacgtcctctgaaaaaaatatacaggctgtgaaatcatttgctgatcattatcagctgacctttcctattctgattgacaaaagcggaattaacggagatttcaacgtgctttcttatccgacaacatacatattagacgaaaaaggaaccattcagcatattcgcgtaggcacgatgacaaaaaaagaaatgaaagaaaaactggatctcaaatagaggttcagtttttttattgtgaagggcttaggttttgaaaaattggaaaaaatgaatgaaaacacggaggtgagaagattgaaaaaaatgcgaaaacgttcttttcatgaattggttatggaaaataaacgtgagctgatgaccaatacggaatatttgaatcagcttgaagaaaagctggagcagcggttcaaacaaaaataacctttaatttgcagtcatgtttgcacctccttttgcaaaatatactcttaaggagggatgaacatgggcataaacaagaaagacggccagccgcaatacgctccgagccacttagggacaaaacccgttaaatataaacgcaacaaaggggaaaagtttcatgacaagtcaaacggacatccgattgtcatgcagacgaaaggcgaataacatcatcaaaggagagcagacattatgacaaacaattatcaaaaaccgaatccggatgaccgttccgataacgttgaaaagctgcaggatatggtgcagaatacaattgaaaatatagaagaagccaaagaatcaatggaatttgcgacagatgaggaaaaacagcgcattcaagagaagaatgccagacgcaatgaaagcattgaatcgttccgcagtgaaatccaggatgaatcggctgcaagagaaaacggctatcaatcataataaaaaccagggaaacctggtttttttctctttccggctcgttgtgataaaatggggctaatctgataataagggagcagagaacgttgcatgtgtcaaaaaaagaaatagaagtgcgttatgcggaaacagatcaaatgggtatcgtctatcatgccaattacttagtctggatggaggtcggcagaacggcgctgattaaggaactcggattcctttacaaggatatggaagacagaggagtgctgtcccctgtattggatatcagcatttcttataaaaagccgctccgctacggagaaacggctgtcgtacatacttggattgaagaatataacggatttaaaaccgtttacggctaccacatctataatccggatcaagaacttgccatcaaagcgacatcctctcatatatgcgttgataaagagagcttcaaaccgattcagtttcgcaaggcttttcctgattggcatgccgcttacgaaaaggcaaaaaaataaggagcggctgcagttatggcatttggaattacgcgtaaggaactggaaagatggaagcgggatgtatcggaagggaaaatcgcttttttaacgcattactggctggacgaccgctttccggaggctaagaccgtgacgaaggccggttcaagcgatctcaataaactgatcagatggggagctgagtatgggctgaagccggagtggattcaccataaaaatgaatttccccactttgacctgctcggtgatacgcaaagaagcatattagaaaaagaacatctgactgatcatctcaaaaggttcaggctgtaaaaaaagaacgcatccgctgcgttctttttttcttacacgtaatcaaataccggctcttctgcctgatctgaatatgtgactgacaaatcgtgattatcaaagtaccataagtcgctttcttcaataaaaaaggtaatgccttcaacttccgtgctggtgccgatgttcatcggccggtcttttaaaatgccgagagaaaagcctttctgaacgttgctgcatcccccgtaacggacaaagaaacggacatggtcgcctgtttccagatcgagctcttctttgtaccaatccagcgcgcctttcgttactttcatgttcatccggaacactccctttttgtttctcatataaagaaattatctctattataaacgcatatggcattttgatgtcaaaattgaagtttcatcaaaaccatttgatcttcggttctgttttgtttataatccgtttgatgtttgccctgtgtctgtagataacaaacgcggtcaagagcgtcactacgactaataaataagggtcttttacaaacagacagtaaataatcgtataaatccctgttaacattgaagacagagaaacaaatttcgtaaggaataaaaatacgaaaaatactgcaaccatcgtaacgaataacagcggagcataaaacagcaggacgccccctgatgtggctacggctttgcctcccttaaactttgcgaacacggggaatacatggccgattactgctgccacccctgcgagaagaggatgaatggggacgtgcagtaaatatgggagcgccgcggccaaggtgccttttaaaatatcggctgcgatgacaacagatcccgctttaacgccaagcgtgcgaaaagcatttgtagcgcccaaattgccgcttccgtgttctctaatatcgatccctttcgcaagtttgcctacgattaaacctgacgggatgctgcctattacataggccaaaataatcaataaagcaatcaacatctacatttctccttttcaatgtcccttcactctattttaacacgagttgttaccgtctgatgacaagttttttgagaattaagctgacaaagcgctttttttgattccggcgaagcggtcatgtacaatatatcaaaaggagatggtaaagatgcaaaatccttcaaaatcagagattaaagaaattctggatcggagcaaacggatcgcagtcgtcgggctgtcagaccgtcccgaccggacttcttacatggtttccaaagcgatgcaggatgaagggtatgaaattattcccgtcaatccaacgattgatgaggcgcttggcgttaaagccgtcgcttcattaaaagacgtggagggaccgattgatatcgtgaatgtgttcagacgctctgagcagcttcccggcgtcgctgaagaatttttacagacggacgctcccgttttttgggcgcagcagggccttgcaaatgaagaagcgtatcgcatgattacagacaaaggacggacggctgttatggatttatgtataaaagtcgcccgcgctgttataaaataggaacaaaaaaggcaaaaatccttggcaaatcaggggtttttgcttttttattgaaagaatactctttgcgtatgatgatgaaacagatacaataaagcatgaacagcttttttagaaacccctttatacaggggtttacagtctgtttgcgatggccggcatatagctatataatagaaagcgaactcatgttcttatccgctgaaaagggcaccaaaaagatgaaaagccgttcgaatgtatgtcttgcggcctaaaaaacgagccattcgcttaaatatgttgcgaaatcaagcatattggttataattgtgagtccgaggagaattggaccgaagcttgcgcatactgaaaaacaaagacatgaaaacatttaaaaaagagaatgattaagagcaggttttttgaaaggggtttgtacgtttggctagaaaacagcaatttgattacaacgaagatgccatacaggtgcttgaaggcctggaagccgtcagaaaacgaccgggaatgtacattggttcgacggacgcacgcggcctgcaccatctggtatatgagatcgtcgacaattccgtcgatgaagttcttgccggctacggagatcatattatcgtaacgatacataaggacaacagcatctccgtacaagacagaggacgcggaatgccgaccgggatgcataagctcggaaagccgacgccggaagttattttcaccgtgctgcatgccggggggaaattcggacagggcggctataaaacaagcggcggtctgcatggtgtcggcgcatctgtcgtaaacgcattatcggagtggctgacagttactattgagcgtgacggatatgtttataaacagcggtttgaaaacggcggcaagcccgtgacttcacttgaaaaaatcggaacgaccaaaaaaacgggaacgcttacccattttaaacctgatccgtcaatgttcagcgcaacggtttataattttgacacgctgtcagaacgtctgcgcgaatcggctttcttgttaaaaggcttgaaaatagaattaattgatgaacggaacggcgtaaaagaagtattttattatgagaacggaattgaagcgtttgtcgcttatctaaacgaggaaaaagacgctttatgcgaagtggtttcctttgaaggcgagcatcatgacattgaagtcgatttcgcgtttcagtttaatgacgggtattcagaaaatatgctgtcattcgttaataacgtcagaacaaaggacggcggcacccacgaatcaggagccaaaacggcaatgacaagagcgtttaacgagtatgcgcgaaaggtagcccttttaaaagagaaagacaagaaccttgaaggcgccgatatcagggaaggtttgtccgcaatcatttccgtgcgtatcccggaggaactgctgcaatttgaaggccagacgaaagggaagcttggaacaagtgaggcgagatccgccgcggatgccgtcatttccgagaatcttgcttatttcctggaagaaaaccgcgatacagcaaccctgcttgtcaaaaaagcgattaaagcaagccaggcccgtgaagcggcccgtaaagcgagagaagaagcgagaagcggcaaaaaacgcaaaaaatcagaagcgacgctgagcggaaaactcacaccggccggttccagaaatccggcgaagaatgaattgtatcttgtggagggagactctgcgggaggttctgcaaaacagggaagagaccggaaattccaagccgtgctgccccttcgcggaaaggtcatcaacacagagaaagcaaagcttgcagacatcttcaaaaatgaagaaatcaatacgattattcatgcgatcggaggcggtgtcggcgcagattttgagatagacgacatcaattatgacaagatcatcatcatgacggacgcggataccgacggcgcgcacattcaagtcttgctgttaacgtttttctaccgctatatgaaacctttaatcgagcacggaaaagtcttcatcgcccttccgcctctttacaaagtgagcaaaggaagcggtaagaaagagattattgaatatgcttggtccgacgaagaaatggacggcgttttaaagaaagtcggcaaagggtataccatccagcgctataaaggtctgggagaaatgaacgcagaccagctctgggaaacgacgatgaatcccgaatcgcgaacgctcgtcagagtcaagatcgacgatgcggcacgggtagagcgccgtgtaacgacattaatgggagacaaagtagaaccgagaagaaaatggattgaaaaaaatgttgccttcggattagatgaggaaagcaatattttagaaaatgaaaacttgtcggtcgctgaggaggtttaatagtggcacagccagaattatttcatgatttaccgttagaagaagtaatcggcgaccgtttcggacgctatagtaaatacattattcaagacagggcgctgcctgatgctcgtgacggtttaaagccggtgcagcggagaattttatacgccatgcacgcagacggaaatactttcgataaaaatttccgtaaagcggcgaaaacggtcggaaacgttatcggtaattatcatccgcacggtgacagctccgtttatgaagcgatggtgcggatgagccaggattggaaagtgcggaatgtcctgattgagatgcacggcaacaatggaagcattgacggtgatccgccggctgccatgcgttatacggaagcgagattatcttctatcgcatcagagcttttgcgtgacattgataaaaatacggttgaattcgttccgaactttgatgacactagtaaagaaccggttgttttgcccgccatgttccctaacttgcttgtcaacggatcaaccgggatttcagcgggctatgcgactgatattccccctcatcatctgggtgaggtcattgatgccgtcattaaacggattgaatctccggattgcaccgtcgatgacttgatgcaggtgattaaagggcctgactttccgacaggaggcattattcaaggagtcgacggcattcggaaggcttatgaaaccgggaaaggcaaaattattatccgcggcaaggctgaagtggaatccgtaagaggcggacgggagcagatcgtcattacagaaattccgtttgaagtaaacaaagccaatctcgtaaagaaaatggacgaataccgcatagacaaaaaagtcgaaggcatttctgaagtccgggatgaaactgaccgcacggggcttcgggtggtcgttgagttaaagaaagaagccgatgcaaaaggcattttgaatttcttatataaaaacactgatctgcagacaacatataactttaatatggtcgccatacataaccgccggccgatgctgatgagtcttacggccatcctggatgcgtatatttcccatcagaaggaagtggtgacaaaccgctccgtctttgaattgcaaaaagcaaaagagcggcaccacatcgttgacggactgatgaaggcactgtctgtgttagatgaggtcatagccgtcatccgggccagcagcgacaagaaagatgcgaaacaaaacgtaatgtctaaattcgcatttacggagccgcaggccgaagcgatcgtatccttgcagctgtatcgtctgacaaacacggatattacggcgctaaaagaggaagcggaagagctcagcaagaaaattcaggagctcgaagccattttaagtcatgataaaaagctgttaaaagtcattacaagcagcctgaaaaaattgaaaaagacctatgctgacagcagacggtctgtcattgaagaaaagattgaggaaattaaaatcaatcttgaagtcatggtagcctctgaggacgtatatgtgacagtcacaaaagacggctatgtaaaacgaacaagtcagcggtcatttgccgcttctaacggccaggatttcggtatgaaggatactgacaggctgattcaccaatttgaaatgaatacaacggatgttctcctgctctttaccaataagggaagctatgtttattgtccggttcaccagcttcccgatatcaggtggaaagacatggggcagcacgtaacgaacatcatcacgattgaccgtgatgaaaccatcgtgaaagctataccggtaaaagaatttgatccatcttcatatttattgtttatgacgaaaaacggcatggtgaagagaactgaaatgacgcattacaaagcgcagcgttactcgaaagcgcttgttgcccttaaccttaaaggggacgacgagctgattgatgttcatgtcacagacggcggcagccagctgtttatcgccacccgcctcgggtacggtttatggttcggtgaagatgaagtaaatgtagtcggtgcccgtgcggccggcgtaaagggcataaatgtaaaagacggtgataccgtcgtatcaggacaaatcctgcatgagacagattcgcttgtccttgtcacacagcggggagcaatcaagcggatgaacctatctgaattcgaaaaaacatccagggcgaagcgcggtgtcatcatgctgcgtgagcttaaaaagaacccgcatcgcgcagtcggcgtattcgcgtgcgctttagccgacatgatcgctgcggaaacagaaaaaggcgagagaatcgaaatcgccgtgaagtccttgcgggcgaatgaccgatacagcaacggttccttctttaccgatgaagatgagacagggccggtaacagatgtatggcgtatccccgcgtctgatgtttaagagtaaaaataaaataaaaaaacctccgctcattgagcggaggttttactatttagctttcatggctgccgaataagtcagtgatagcgtgaatgacttcgattccctgccatacaaataaattcaatgcagtgaatgaaaataaccctaaaatcaccattcgtaagataaacaacatgtttaacaacctcctcattttatgttacatagataggcgatgttgaacatgaagctcatcgaaatacgaggactgataaaatttagcgattaaaaagcttttctttcgctgtcttctccgggaagcggggcgtctcctgtctgatatcacgatcagtgagacagaagcggcaaaaagcgccgtcaagatatatgagcccgtcagcgattttttctcatcatcagcattttggccggccttcatttcgtgcatttcctgctggtcggctaccgctttaaaatgatgagcagtatcaaacgcatggggaatggagagcaaatgaaagcttgcaatcgctaaaaataaaatagaagcttttaaaaacaagatttttttcaaatgttctccccccttcataagtctgaatatttttattataataccctaatttaaatgtaaagtaaacatatttattaaatttaaaaaattattatcctggttaagtatataccattccatccatcttttcatctcttttttcttaaagacctatttgttatgatatgcacgcattccttatgacgtgacaacatctttcgggctgtaagataaaaaacggggcatgacagcaaaagacgtgatgtagaaaccgaaacattttcttaaaaaaacttctcaaccactgttgttgtgatataataatactcgttgtgttaaaagatctaacatatgcagcaaaaatgacagtaaaagatatgtaaaagggaggttaaacatggaggctttcatcagtgaaatcataaatgttccaaatgattttatttggaagtatcttgtttatattttagtcgggatcggattgtactttacgttccgttttcgctttattcaattccaatactttattgaaatgttcagaatcgtcggggagaagccgcaagggaataaaggagtgtcttcaatgcaggcattctttatctcagccgcttctcgtgtcggaaccggaaacttgaccggcgtcgcgctggcgattgcaacaggcggtcccggcgcagtattttggatgtggatcgtagcgattgtcggtatggcttccagctttgtggaaagcaccttggcgcagctgtataaagtgcgttccggtgacgaattccgcggcggtccggcatattacatggcaaagggactgggcgcccgctggctcggtattttattcgcggtattgattaccgtttctttcggacttatctttaacgccgtgcagtcaaatacgatttctgtggcgtttgacgaagcattccatgtgaataaaacagttatcgcaatcattttagctgtattaacggctttcattatattcggcggtctgaaacgtgttgtttccgtttcgcaattaatcgttccggtcatggcgggtatgtatattctgatcgcgctgtatgtcgtgattgtaaatattacagcggtacctgagctgtttgttacgattgtgaaaaatgcgttcggtcttgaacagatcgtcggcggaagcttaggaagcatcattattatcggtgcgcagcgcggcctgttttcaaacgaagcgggtatgggaagcgcgccgaatgccgcagcggctgcacatgtgtcgcatccggctaagcagggattaattcagacgctcggcgtgttttttgatacatttattgtttgtacatcgactgcctttatcattttattgtacagctttacgcctaaaggcgacggcatccaagtgacacaagccgcattgcagcaccacctcggcggctgggccccgacatttattgcgattgcgatgtttttattcgcattcagctctgtggtcggcaactattactatggtgaaacgaatattgaatttattaaaacaagcaaaacatggcttaatatttaccgcgtattcgtcgtagtgatggtggtatacggatgtttggctgacttccagatcgtctgggacatggcaaacttgtttatgggactcttggctctcattaacttagtggcaattttactgctgagtaatgtagcctacaagatctataaggattatgccgctcagcgcaaaaaaggtcttgatcccgtattcaaagccgagaataccccggagctcaagcatattgaaacatgggcggaagaagaaggtacaagccccgaacgtaagactgctaactgaggaaacatgcatacaattttcaaaaaacctcttacattttgttgtgaggggtttttttatgtgaaaaaccgggttatttttactgaaaacagatttttttgaatttattgtatttttatcttgcgtgtgtaagggttttcatataaagttttactaaaccggtttaccaaaccgatttagtcttcaaagaaaggagtattgatgtggcttctgattatggcatttttacgatcggtgatgcgatgatcaccttaaatcccgcaagcacaggacctttgcgttttgttacccattttgaacgaaaagcaggaggagctgaactgaattttgcgattgcatgcgccagattgaatctgcactcaaagtgggtcagcagactggggaaggatgagttcggcagagtgatttatcagtttgccaaaggagaaggaattgatgtgactgacgtctcctatgttgaaggctttcctacatctttaaatgtcaaagagatcagaaatgacggttcaggcaagacgttttattatcgtttcaattcaccaattctgactcttgcaccggaagatataacagagaatatgtttgccggcattcacatcgttcatcttaccggtgtgttcctcgcacttgataagaaaaatcttgaaattgctgaaagggtgctttccatcgccaaagcaagagggattcccgtatcttttgatccgaatatcaggctgaagctgtggacgattgaggaggcgcgtgcggcatttcatcaaatctttccgcatactgatattcttctggcgggccgggacgaaatgaaacagctgacaggtataggggaaaatgaagcattagcccggtttgcagagacctattcaatcagccagctcgtcataaaagacggtgaagcaggttctatgctgtatcatgatcataagtgggttcataaagaggctttcccggttgcgcctgttgacacggtaggagcgggtgacggctttaatgccggctacctgtacagttatctgcatggttttgaaccggaaaaacgtctggagtttgccaatgcggtcggtgcgctcgtcaccacagtttccggtgacaatgaagggcttccctatctagaagaggttctgtcatttgtaaacaaagagactgtgattgaacggtagcaagcacaacttaaaaagcgggtgagaaaatgaaagcggttctagtacggaaagcatttgatctggtggtgacggaatgtgagaaaccgtctgttgtccacgcggatgatgttcttgtcaaggtgaagcaggtcggaatttgcggatcagatttgcatatttatcatgggacaaatccgttagcgtccctgccgagagtaatcggacatgaagttacaggggaagtcgcaaataccggttctcatgtccggcgtttcaagccgggtgaccgcgtagtggttgaaccgatatcttattgcggaacatgctatgcctgccggaaaggacgtccgaacgtctgcaaagcgctttcggtgttcggcgttcatgaagatggcgggatgcgggaatatatcgtggttccggaaaagcagctgcatgccgtttcccccgctctgccctgggaggaagcggtcatggcagaaccatatacgatcggcgcccaggccgtttggagaggccgtgtcgagaaggaagataccgttttgattcagggagcgggaccgatcggaatctgcatattaaaaatggcaaagttcaaaggcgctactgtcatgataaccgacttgaatgatgaacgcttggcattcgctgaaaaaaacggtgcggacgttaccgtcaacgcgcaaaaagaagatcccgttttgcgggtgaacgaatggacaaaaaaagaaggcgccaatgtcgtcattgatgccgtctgtctcccctcaacgtttgaaacgtccattgacgcggtgtctccggccggtcatgtggttgtgcttggttttgatgagaggactgccggcatttctcagcttccgatcacaaaaaaggaagtcacgataaccggttcaagattgcagacgaatcagtttccgtacattacagacttactgaataaaggcctgttaacgcacggcggtcttattacacatacattttcagcagatgacgtccatcaagcatttcagttgatcgaacagcacccggacaaggtgggaaaagcaatcattacgtttgattaaaggaggagcgagaatgctgcctaagtacgccatttacgaaaaacttctgcatgcacaagtggtggctgtcataaggggacaaaacagccaagaggcgcttgaagtttcaaaagcggccatttcaggaggtatcagcgccattgagcttacatacacaactcctgaagtggaagatgtctttaaggaactccggcatcaagatattcttcttggagccggttctgtaatggatacagaaacggcgagacacgccattttatcaggcgcctcatttatcgtcagctctcattttgtaaaagagatagcatctctatgcaaccagtacagcgtaccgtatcttccgggatgcatgagcgtgtctgatatggctttggcgctcgaagccggatgtgatgtggtaaagctgttccccgctaattcgtttgacccttcatttatcaagtcggtcaacggccctctgccgaatgtccgcattatgccgaccgggggtatctcattaaacagcatgaatgactggctctctgccggagcggtcgcggtcggtgtgggaagcgacttgacaaaagcatatcaaaagggcggctatgaagctgccgtatccctcagcaaagaatacgtctgccgaaaaaacgaatatacgggggtgtaacatgaatatcacgtttcgctggtacggccaaggtaatgatacggtgactcttgaacatgtcagacaaattcccggggtcaaaggcatcgtctgggctcttcaccagaagcccgcgggcgaagtatggggaaaggaggacattgaagcggaagtcagattcattcaatcctatgggtttcatgcagaggtcgtggaaagcgtgaatgttcatgaagccattaaactcggtcatgaagaacgcggacaatatattgagcactataaacagaccattcgcaatctgtccgaattcggcgtgaaagtcatctgttacaatttcatgccgatatttgactggacgcgtaccgatatgttccgcgcgctggaggatgggtcaaccgctttgttttttgaaaaagcgaaagtggaaagtctccctccggaggaactgatccgcacggttgaagaatcttctgatttgacgcttcccgggtgggagccggagaaaatggcccggatcaaggaactgtttgaggcctatcaaacggttgatgaaaaacagctttgggccaatcttgagttctttttacatggaatccttcctgtagcggaggaacacggcattcaaatggccattcatccggatgatccgccctggtcaatttttgacctgccccgtattatcaccggtgagaaaagttatgaaaagctgcgagagatttcagattcacccgccaattgtattacgttgtgcacgggttcgatgggagcggatcccgccaatgatatggtgaagatcgccaaacactatgcgggagctgcgccgtttgcccatatacgaaatgtgaaaatctgcgataacggtgattttacggaaacttcgcatcttaccagtgatgggtccattgatattaccggtgtggtaaaagaattgcacggccaaggctataaaggatatgtacggcctgatcacggccgtcatatctggggcgaacaatgccggccgggttatggtttatatgatcgtgccttaggaattatgtacttgaacggactgtgggatgcgttctcgtctcatgagaaagaggtgaagggatgagaccgattcatgaacgtttatcaggaagaaccgctgtcataacaggcgggagcggtgttctctgttcagcaatggcaaaggagctttcacggcaggggatgaaaattgcgatcgtcagccggaatgctgataaagcagagcgtgcggcggccgagattgctgatgctggaggaaccgcggtttctgtaccggctgatgtttcagcccgtgattcgctcgaaaaggcaaaagacgagattatcagccggtacggttctgtcaatcttttaattaacggagccgggggaaaccaccctgatgcgatcactgccagcgagacgtatgaagaggatgagcagggcacatcattttttgatatggacgaaacggggttttccagcgtattttcaaccaactttaccggtgcatttctggcatcgcaagtgtttggaaaagacctactgaaggcggaatgtcccgcgattattaatatttcttctatgagtgcgtatacaccgatgacaaaggtgcccgcctacagcgcggccaaggcggcgattcagaattttacgatgtggatggctgttcatttcgcaaaaaaagggctgcgggtgaatgccatcgctccgggtttctttttgacagcgcaaaaccgtgggttgttattacaggaagatggaagtctgacagaccgatccaataagattatggcacatacaccgatgaaacgtttcgggaaaccggaagaccttctgggaacgctcctgtggctttcggatgattcatgctcaggcttcgtcaccggggtcaccgttcccgtcgacggaggttttatggcttattccggagtgtgacagaatccatgtccctgtcagattgtaaaccatttacttctgacttatactagtgaaaaatgaagacagacggggatgagtctatgaaaaccattacaatttctgatgtggcgaaatatgcaaacgtatctaaaagcaccgtatctcaatttttaaatcagcgctatgactatatgagcgagaaaacgaaacaaaaaatagaagcggccattcaagagctgaactatcagccgaatttcgtcgcccgcagcttaaaacagaaatcaacatttacggtaggtgtggtggtggctaatattcttcacaccttttccactcaggtcatcagggcggtggaagactattttcatgaacaaggatttcatattattgtctgcaatgcggatgatgaaccggaaaaagaaaagaaatatattgaaatgctgcgggctaagcaggtggacggaattattatttttccgacgggcgaaaatctctctttatatgaaaagatgaaacgcgatacgtttccggtcgtgtttatggacagaaccattgaagaactcgggattccgacagtgatgcttgataaccatcatgcagccggtcttgccgttgaccggtttatcgagagcggcattaagagaattgcgattattacgacgtccattattcgggaaatcagtccgagggtagaaaggattgaagggtataagaaggcgcttgaccgccacggtatgatggtgcgggacgaatatatcaaaacagccgatgcggctgatatttccaatgttttgtcagagctgttctcacttgaggagcctccgaaagcgatattggcggcaaacgatatcgttcttgttgaggtgctgaagtatatgaaggagcatgatatgacaattccggataaggcagccgtcatcggaattgatgaagttccttttgcgggtttttttactcctccgattacgacgatcgtccagcctgcggcagaaatggcgcgaaaagcgggaagccttcttcttcgccagatacaagaaaaagatggcggtgaaaaacggattcaccgctataaaccggcgctgctcgcaaggcaatccggataaccggtttcattgcataaaccggtttactccggcaatttaaatgtctgaatattatgaaatgagagggggattatatgttctcaaaagatagattccctattattcttcttttattttcagccggggtgattaactatttagaccgctcagcgctgtctattgcagcgccgttcatacagcaggatctcacattgtcggcaacccaaatggggctgattttcagcagtttttctgtcggatacgctgtgtttaactttctcggcggtgttgcatctgaccggtatggggctaaattgacattgtgtacggcgatgatcgtttggtctcttttcagcggagcggttgcgcttgctttcggatttgtaagtcttttgattatccgtgttttattcggtatgggagaggggccgctgtcggctgccataagcaaaatggtcaacaattggtttcctccgtctcagcgcgccacggtcatcggcctgacaaacagcggcacgccgctcggcggggcgatttccggcccgattgtcgggatgattgctgtgacgttcagctggaaggtttcctttgtcctgatcatgattatcggtttagtctgggcggtcatctggtttaaatatgtcaaagaacggccggcgccgacggaagacgccccggcaatgaaagcggcgattcaatcgcatgagcagcatatcgcgatgaccttttatttgaaacaaaaaacggttctcttcacggcttttgcctttttcgcctacaattacatcttatttttcttcttaacatggtttccgagctatctggtgaaagaacgcggtttaagtgttgaatttatgagcgtggtgactgttattccctggattcttggatttatcggtttggcggcaggcggaatgatttctgattatgtattcaaaaaaacagccggaaaaggggttttgttctcacggaaagtcattcttgtcacttgtttgttcgcttccgctgtactgatcggatttgccggacttgttaccactaccgtaagtgccgttattctcgttgctttatcagtcttctttttatatataacgggctctatctattgggcggtgattcatgatgtggttgatcaaaggaatgtcggatcagtcggcggctttatgcattttcttgcaaacacggccggtattatcgggcctgctttaaccggctttatcgcggacaaaagcggatcattctccggggcgtttttgcttgcaggcggattagccgttttggcctcggctgcggtaatccgtttcgtgcgcccgattatcattcaaaccgcttctgaagataaaaaagacacgataccttattcataagtcatcaaagccactgaggctgtcctgccgataacgggatggccttttcgttctgccgcttgatctgttcctatgataatataggaattgtttacaaaagaagggaagaggagggggcatgaaacagaagccgatatatgtcgaaatcaatattgcatctgatatagaaacgctttgggaatatacgcaaaacccgcatcttcataaagaatgggatctgcgtttttctgacattacatatcttcataggctgccagatgaaccgcagagatttctatatgaaacacgaatcggttttgggctgaaggtatccggcacgggcgaatcaataggtgacataaggtctcgctcgtcagaaagagtgtcttcgctcgcttttgcctctgatcatccgctgtcacttataaaagaaggcaggggctactggaagtatatagagcgggataacggacaaaccgcatttttgactcaatatcaatatgaaacggcccgcggtctgccgggaagttggatagaccggtttttatttcgtcctctgctaagctgggctaccgcatggagctttgatgcgttgcggctttggatagaacaaaacagacatccgaagatatcagtccgtttcgggtttgtctatgtctttatgtgtctcgtattcagtctgtattggttttttcaaggctttcatgatggctgtgccgatgcagagatcgtgaggggagcgctggagacagggttaggggtattatggctgcttcccatgcggagaaagtggctgattcacaccgggcagtcagtcttcttttgtgtaacggcactgctatattcgggcggcggattcgtgatctcattaggagtgcttacgatagccgcaatgattcttaagctcaagctgccgagcgcctggcatacaaaacgaaagagagaagtgaaatgacggattcaatgtatgaaaaagcgattactcattatcaatcactgcacccgatgctgcagaaacggtacagatttgacggatcacgcacgttttgcggagaaggaattatgtcagaaataaagggaggttcttttcttgtcagaatgcttttaaagacaggtgtttttttcagatgttttttctcagagaggggaaacgatatccctttcactatcgaaaacaaaaacaggcaaaatggcgtggaatggaatcgtacctttttctttaaaagcaaaacgcgtttttttgatgcagtcatggaatataatgagcgggaaaacagaattcttgattacttcggcaaaccccgcatcctactgtctgaactgcatttagaagcgtcttcagacggagggcttgttattacatccggaaggcagtggctcctgatagtcggaaagaaaatcccgcttccggcatggctgtgcggcagttcaaccgtttatgaggcttatgatgaggaaatgaattgcttcagcataaaggttcatgtgaaaaaccggatactcggcacgcttttctcttaccgggggactttccgggaaacagagggagaaacatgctgaagcgtcatctcatggtaagcgtgatttgctttttgggatttgcggcggctgaagctccgtatatatcagctgctgagatgtttgttttattttccgtactttttttcgttcccgctgtattcgattttgcttttcgaccgtcaaagaccttagagaatgtgttattacggagttatcctgttgccgctttatgtgcggtgcttgcgcttgtcacagacttcagtttttttgccgttgtgtggctcatttatacggttgggctggcactgtatgctgtccggcggctgatgaaaacaaatattcacagaacagaagagatgtctgttatggcgggtttcatttatttggccgggggcggattctggttcttcgcatatgtccttgagattcccgtcatgaatttcggcccgcttatcgttctgctgacggcggtgcactttcactattccgcttttctcattccgatctttaacggattgctcggcaggatcatacgggagaaacgggttctttacagatggagcacggtcattattttgatttcgccgatccttattgccttggggattacattttcaaagacacttgatgtgattgctgtcgctctgtatctggcgggtctgtatgtaaatgcatatctcgtctttacggcgccgtttgttacgaaaacaggcaggatcttgatcaggagttcttcggctgtgttaatgatcacaattgctttttctttgatatattcgtacggtgtctaccgcgaggaggcaacgctcacgatcagccagatgatttggattcacggggccgtcaatgcattcggcgttatcctgccggctttggcggggtggaggttggaaaatccgagaccgtttgatgagggcagcgaaagaacgttcagccgtatttacgggaagagaacgataggcaaagactttttgactgatattcatgcagcaaatgacatccattataccggccttctggatcagctgagagaactgcattctgaagacttttcaactgaaaaactggcgccggccgttatttccttttatgaagagacaattgattatgacatcatggcaaaagtgacgtggagcggatggtttcgtccgttcgcgcgcgtgtacgagccgttcagcagaagagcggggcagattcacctgtccatgaatccggattggtatatcatgcacagtgatattataggagttgactctgacaaagacggcagaaaaaatgtccgtgcgtggatcagaacaaatgaaaagcaggaaaccgtttttactgcgctgtattcagcgtacagggcaaaaggggaaggatacatgaatatctctcttccgctgccgtacggccaaatgacgggcattttaaagccttatgcgcgtaagcagaatcttgttttgacaagcagacggcgaaaaagcggagcgggtgatgaagggatttatctgcagacgaaatgggggacgtgtcatcttccgctggcagagacatttcttatttcagcccagagcgaaaccagcctgaaggccgttcatcatatgtggctgttcggactgaaatttttaactgtgcattatcggatcactcatgcttccgcaggtaaccgaatggaagaaaaaagatgaagggtatacctacgcttccgtgtatcaaaccctttttggaaacaaggctttttgggatacaaaataaagaaaacgatagcaaagtgatttttaaatttttcttccggtgtggtcaaacttgaatacaagacagcaccggatttctttttatggaggctgtccaatgaagaaaacaatctacatattgttcattttggttttgctctcaatgaatatatcaagctatcattacactcttaacaaacaaatctattacactttattctcaaataaagaagcattgataatcaattatacttcagaatttaaaagtgaggactttgtaaagagattggtcgccttctccaaagaaaacaaagtgaatatttctcaatacaatttcttagatgagaagagcttaaacatctattctacaaaccctaaaaatgaaccatcaatacataacggcaataagcttgtgtcaaattttctaagagatcattcaaatcagaagatgatcggcagcatttcttttccactctcgacatggaaaatcagatattttgattttaaccaaataaagaatataggcataggaagcaaattttatatttcatctaacgatgacaaggtattggagaaagcacaaaacctttttgctgactatggtgaagtaagttttgatgacatcactgagaatactgcttttatgtttaacaaaactttgcttatgctagtgttgctttctatgctgattttgtttattggtgtcctttattttgtaattaaaaatcgcaaacggcttctgctgcaaaagttatgggggtattccaaagttaaaacactgctttcttacccagcaatgtttttgaagcctctaattataatcatattttgcggtgcaattattgtagctttactagctttttctttcaatttaaatgactggctggctgcatatcttagaatttatattagaaacgcggtgattggtgcgcttatcatgatggtatacaccatcatggttaccctcgtcttgtataacaacagcgacattagtggctcgatcaaaggcagcacaccgattaaaaaattccaatggttatctgtaggctttaaaattgttgtcacgatattgctcttcaatattgttgcgttttcactttctaacgtattcgatctcaaacagcagcttgataatcaatcgtactggaaaaagacacaaaacacttataagacaagctttgcaaataccgggatagactatagtgatttaaaattagacagggagaaaaatgttagagttcgcgcgttgtatcatcaattagagaagcataaaaatgcgttcgtcattgatgcacataactatgctgtactaaggaaagacggaaaaaaacctgtttatttttacaccttaaatacgacaaagaaaaatgaaatttactctccttctggacgaagtattacaatcagccctaattatttaaaggtgaatcccattatcggcgctaatggggaagccataagccaaaagcaattaagggttgattcaaatacattgaacctgcttgttccacaaaagtatgaaaaatataaagaaaaaataatagctacatacagggatcagtttttctttgacaaagttgaattagataatatgtataacaaggagatgaatcaacctttaaacacccttaaaaaagatgaattgaaaatcaacatcatttatactaaaaataggcaggagtatttcacctttaatagtgagtttggggatgccggcaataaaaataacattgttgatccaatagctgcaattttcacggacaacgttgatctatctgttataggtgcttactcaacctcaagtttattcttttcagattcttcaaaaggcatggcgtatgaccgcatagttccttatttggagaagaccaatacgagagatctaattgattcatcaatttcggtttatcaagaactaagcgacggtatagcaagaattcagaatcaattcttgcagaatttaattggactaacaataacagttatcctctccatcgcctttcttgttgcttatatttggtcgtattacagcgcgaatgcatatcggctgtaccttaaagagctttttggatattcatattgggccagaaataaaaatttaatcatcttttctcttctatccaattgccttattggtttaggtatcagtatatattatagaatctttgaattaacaatttttgttgggctgtttattgtaatcgagctgcttattctttatttcctgagtgtctatttaaacaagaaaaacatgcataagatcttaaaaggagatagaatatgattacactcaacaacatatcaaagacgtttaatgaaaaacctgttctgtcgaatttctctcttcagataaaagaaaatgaatttgtttcaattgttggtaagagcggttcagggaagacaacccttctaaatataataggccttcttgatactccacactcaggagatattgaaattttaggttttcgaaatcctaaatctaacgacgtgatgaaactgcggagagagaacttagggtatatctttcaaaattacgtgcttatggacaatgaaacagtattaacaaacttactgctttcgacggcttatgcaaaagactttaagaaagaaaagttgacagaagcattagaaatggtcggccttgataaaagctttttaaagaaaaaggtctatcagctgagtggcggagagcagcagcgtgtggccatcgcaagaattattttgaagccttgtgatattatcctggctgatgaaccgacaggaaacttagacgaatataacaaaagcattattttgtctttattccatcagttaaaaggtatggggaaaacgattatttgtgttactcacgatcaagaaatcgccaatgggtctgacagagttattaatctttcataaggagaggttctaaataaaacatattacttttgcactgtctacaagtgtcctgattattattacaggggtcgttcacagagtaatctttagaatgtttggcttaccttttgatcaagcaataattttctggggcggatttgtagttgtttattttgtactagctctgctttcttctttactctttaggaatttaggttcaaacagcagaaattacgaggcttaattaaaggctttaatgcttcctcacgaagtaatcaagaagggtacatgttgttctagaagaaaggaccggccaacacgccggtttttttatgtaagcacatttgcaaagaggatcgctatcagaagcccttcgaaaagtttcagaattcaagaatggaaaagaatcgccataattttgtattttttcctaaaataatactctcatctacaaaatatgacaaatttccctcttgcaaggtgataaaatcagattgcctgctaagtgagtaagcagcaggcaacaaatcaaaagggggcaataaaaatgttgaaaagtaaactcaaaaagatagcaggagctacagcactggtgggggccttgctattatctggcgcacaagcagctgatgctgcaactaaaccaggaaatttaataccaattcgcaacaaaaaatttgatgataaggttgaagaatacaaatggctaggtagtgatcaagtcagaattttctttagagacagtgatggaaactattattttgatgattttgattgtgtaacagtaaaaggtggagtttgttacgtatatgaatgaagaagtcttattcataatatatagagaagataaatcgtaataagtcctattttttcttattttgtctcaatatctaagtatacttaagataacgagacagaattttcatcaaagatttaacttcctagaatatatattatgtaaactagaaattgtgaagagaatataaaagtggatccatattctaagaacatcccctttttgtaaggtaatattaaaaaacctctacgtccttaataaattaaattggtcataaaggtttttcagtttgagtattttaatcggttatgtcacttgttgctggtcttcttgatcaagtccacgccatcgtatgccagactttccacatttgcagccttctgcagtatgtaatgatcaaaaaagttcttcgtatagtctgtaacaagatttcgcatctccatggcatcccgttcgcctctaagttcctcattcacactggtaaacacgatgtcgcagtaatctaaatgcgcagcacgatcaacagagaaataataggtatccatgctattgttagcgccaatgatcgcattcatgttatagttcggttcagaaaacagcagcaaaaagggtttcttaaggtcgctgccctgaaggccgaacgctccgctatccaagccaatcccgcagatgaaccgttcgtcgtcccggcaaacaatcgccgtcgtaggccctccataagaatgtccgactatgcccatgccgatatcaagcaacaatctgcccttaaagatggaattcagctctccagaatccaatttgacaagataatcggctacataccttacatcttctgcctgtaattcactatactctgttaacttgtcaagtatcggcagtgtaagcacgttttggcacatctcaatggcagtttcatcgtcgggccgtatctccatcttaccagccaaagccagcatctccggatcttcagaaaacgccataatgacatccgaaaaatcctttgatacattaaacaggcgcccatctttacgcttatacatcgtgctattttgatggccgatgcttactacaacatatcccatgcttgccaagtctgtacagatcactgtaccccattctggagaaccgcccccgccgcaaacatagaataacaccggatagcgtttttccttcccggagagagcaaggtcgtcgtaacattgggtcttgatatctatagagtaagcatccttcaacgcagtgagaagcggctgctcatcaagcatttcacagacttcaggaaacatgtacgctgatgtagtcttcccttcgctgctgtcggacggatagtacacaaacgccgtcagttctctttttgtatgatctgatgccgtgtactcaaaatccatctgggttcggccgacagtatagccgccaattggctctggaaatgcgtcatactttttcattctcttgttcccccttacgtaataaaagtggcggatgtgaaatacacacattgcgctataaacgcttttcaaaactgtgaaacaattacatcatatgttcagtgaatcatatctactccttggctttcttgagattgctaacaacatttgtacaggcccatatactgtttcagagtttcatccgccacgtaaacctccttgtattgctgtttaagatgataaaagcggacatcgttgctgatgtccgcctaaagcttaactaattgggttctgttccccaaatcagttttccttgatgatataatgtgatttttttcgttgttttaaacgtatttgattggaaaaaggaataatcgccgctttgtgcataattgctccagtcatcattgtgaagacgaagctgaatattccctgtgcttgctcccggtgacagcgttcctgttttaaaccccagttccagataggtatctgcaccttgcttaggtttatgcagcgtcacaaacttgtgagtcagattgccgcatcccatctgcgcgtagtcacagtcaaagttttggcctttgtttttcacgttataccagtaacgggcagtgacatcttttaaatcaaccgtcgcattgccgttattttttatgtgaagctacgggcggatttgattgctgttcacacgcccatcccctgctttgtattgtacagaaacgcctttttcctgtgcggggttatcttgtgctggcgtttcagggacgtccttcgtcgaatctttagtgccgcgaatgttttctcttacgaatgttcctgaagcagttaaatctgtaagcggccagccgcctgttttagatgctcccggctttaaagccgaagatgattcctgcttatcagaaagattccagttcacccagctgatgttcttactgtcgagataattcagccattcccgcgactggtcaaggaatacaccgccatttccagacgcgtcgcttgttccccattccgtcacgaaaataggcgctcctttactgagtgcatagtttgctttatcccgtaaagattggccatgtgtgccggcataaaaatgaagcgcgtacatgacgtttgcatcttttagctgatcatcggctgcatcattcacatcttggctccatgtaccggtgccgacaatgatgatgttgtctggatcatttttgcggataacggaaatcactgcttccgcatacggtttaatatcacgcttccagttcacgtcaccgtttggttcgtttgcaatttcataaatgacgtttggcgtgtttccgtaaagacttgacatctccttgaaaaattcttttgccttctctttattttggtttgggttgccgtcatttaaaatatgccagtcaatgatgacatatatcccaagttcttttgccgcttcaaccgcttcttttactttatttttcacggacgggttgtcaatataaccgccatctgccgtatacatcgccgcgcggaaaacggttatgccccaatcgtctctcagccattttaagctgtctttattgacgaaatcgccataccattgcaatccatgtgaactgatccctttcagttgtaccgctttgccgtctcggtttacaagttgtgtaccttttatgctaagctgaccattcttggctactggcgtttttgtctctgctgctgatgccggcgaaggcagcaagccgcccattgtcaataccgcaatcaataaacacgtaataaaaatagaaattgcccgtttcatatctgatcttttcctccttcgcatcattttggctctttcttatgagctcgaactcattgtaaaaatctttctcatgattgtctatcaacctaatttcttgtttttgggaggtgtaaaagcctgtcaatttgctctatctctattgaataagacacacctgacacatatagaacaaagaaaaccgggctgaatcgggactttacacgtcatttttcaatcgaatcgaaaaattaaatgtatttccaacgtagacacgctgaatgtgatgagtctcaatatggcattgaatcttatgattgctgtaagaagacgagtccttgttaatttaaggttgatgtaaggttcggattaatacgggttaaggttggagttgtacaataagattgtacttcagtgagggattcagccagaagaattcccccttcaataaatcatagaggtgaaaaggtttgagagaaaataaaatgttgtcttcattatgttacttcagtatattttttgcgccgtttctgtttccgattatcgtctatttcttaggccaggacgatgtgaaatatcatgcgaaaaaatctttgtggacgcatctgattccttatttgatttttggaattggcatcatcgcttcaggtttacttggtatgaatgacatcaggcacgccgggcctttcctgcttgcgacgtatgctgctacattccttgtggcgatctattttttcatttggaacattgtcaaaggaatcaaagtgttttcggaacaataggaaaaaacggttctgttattaatcaacagaaccgtttttttgtatagccattatgataattgtatatctatcgttgtcccttctcccgcggtgctgtgaatggtgatgtcccctccgtgcttttggataatatcctttgctatggccattccaagaccagagcctgcatgcgtcgttcctgtatttgtgcccctgtaatagcgatcaaacactttctccagctcctcttcttctatccctttgccgttgtccttaattgtcacatgagttcgttctttttgttcaagctgtacaacgatcttcacatcaggatcattgtgaacgagggcatttaaaatgagattcgtgacggctctcctaatcaatatcgcatcaaggttcggcatcagcttttccacgttcgtttgaagctcaatggacttatccgcatatctagaatcgtttaacatatcaattaacgtttcccgcagcagcgatacaaggtttacccgctctgtatgtaacatcacatcgttgtttttcagccttgtcgttaaatttaaatcttccatcacatctttcatatagagggatttactctcaatgatctgggcgtactctctgatctgctcgactgtgagatgataattcggatctttgatgatttctgcatagccttgaatagatgctaatggtgttttaatgtcatgagaaatatgactgatccactcttcacgcatttgctctaatttatctttttcttttttgcttaaagatagttgttccgataagtgattgacattatagaagacatctttataaatgcctttggatttcatgttgatcgtataatctccattagctaaccgctggattccttgaatgacacggccgagcggttttgtgagctgccggctgaatagatagccaatgagtaacgcgatcaatgcatctattgataataatatgatggttcctgcattgaacttcgtcacaaattccttggtatcatatgagaggacaaattttccgagagagggatttttaaaccctataaagtaactgtactccttgccatttacttttttcccgccagcgtaaatggttgataataattgttcatccttatatttatgtaaatttacaatttcaataggcgtatattttttcttcagtcctttaggttctctatcatgataaacatcctgtccgttttcatctaatatttgaatccatgcattctgctcttttaaagctttttggccctctttgtttactgtgataccattttccgataacgtgacatattgtcggaatgatcttgtgaaagtttccggtgtactttcttcgtcatgttggctgttcgcctggaaaacgagccaaaacataaaaataaataaattaatgaagactgtaatgatggtcacgataatgacagagaccatatatctgcctgttaatcgccaattcatccttacgcatcctttacaacaaatttgtagcctaaccctttcacagtgacgagaaagtctggttttgatgggacagtttctattttctcacggagcctgcgtatatgaaccatcaccgtattgtcagaaccgaagaaatcttctccccatacagcttgataaagtgtttctttactgatcacccgattgggatgctgcagaaaataggtcaaaagcataagttctttaggtgttaactcaatagccgctccatttttggtgagctcggcttgttgttggtttaattcaaatggccctttttttattagggttccggtttgagaaggctgtaagtaagagacccgtctcagctgcgctttgacccgatatgcaacttccttagggctgaagggttttgtaatgtagtcgtccccgccgatggcaagtcctacaattttatccgtttcctccccctttgcagacaaaaagataataggaacgtgtgaaatgtctcttatttgcttgcagatatcatagccttcaccgtctggcagcatgatatccaatatcaccagatcgggattttcttgatgaaattgagccaatccgtcacgggcagtcgaagcggtcactacgcgatcaatgccttctcttattaatacggttttaatcagttccaaaatttctttttcgtcgtctatgattaatactttgctgtgaagccgtgacatataatgatcactccttgaagtcattgtcattattatacccaatgtccatgtatcgttaaaaatcaacacttctctcccacagaaaataagccaattttcttttttgagtaagaaaattggcttattgcgatgctgatgcctttaacgctttacaacaaatgttgtcacgctttgagccggcagatgggcccaaaaatgattgtccgttactttgagatccgttccaggttgaagattgctgctgctgctcgtgatccatctggatacttgcgaagcagttccattctgcaacacgaagttttggttgacccctgtgttatttttattaatggcaacaatcacgactttattgtctcctttataggctgacacgtaaacattcggttcaggatttttcgttgcatcaatccttacatagcctgggcgcacaaattttgagaaatgagccatattgtatccgcgtttgctgatcatcccatcttctttcacagggccgtatgatctgcggatgtaccaccacacataagcttgaaaatctccctctaccattgaatgatgaatatgctctgaaacacctaaagcctcaggccagcgatccgctgaattgttgtcactattcggatagtatacctccgtcatccatagctctttccctcctcctttttgtttgaaaagaggataaggaaactgactgacctgagtgccgtacaggtgggttccgaggatatccatattcctaagcgcctgcggatcgttcaaaatggggtccgatatatttttcaggtattgaaatgattccggcgcaatcacgcgggcattaatggaaccggcattctctctcatgaaacgcaggatttcttggggcgtccaccatgtccattcgtgagcgtaatcaggctcgttttgcatagaaatcgcatacagattcacaccattactcttcatgaaattaacgaaatcgttaagatgctgcgcgtatgcggcgtacttatcgtatctcagccgcttagctgttgtgtcaccattatgattgaaagtctcaaccatatcgtttggcggattccaaggggaagcaaaaacgattgctccatgtttgatcgcactctttgcagtctccacttccttgtaccaattatttctattttcatctacatgaattcttaagaccgaaaaacctaactgattctgtccattgccaaaagcggtctcccgttgagccgcagtcaagtctccaatccaagccgggtggttcattcctccaaaaccgcgaatcacttgtctttctgcagatatattaactgttgcatcacttgctgctgaaacttcagtaactcccggtcctaagagcatgacggacagcattgtgaaacataccaataatacacaaattgttttttttacgctcgatatcattttttcctctccttcatatgtcgtttatggacttagaaaacgtacctttgtctccctttgcttatctttgtgtaaactgccagtaatcgaaattaaacaagtttcctgtaccagttccggtaaatacaaagaatacgttgtgaacaccggatgcgccgcttaccgcagtttctatttctctccaagattgcgttccgcctgtggaagggacattcaaggttccgacaagcttaccgtttgcagtatctagccgcacttctattttcccgccaagagcggacgctacatttgctttaaacgtcctggcaccgcctgacccgaaatctgcatttccaacagcaatccagtctccgttatgaatgtttgtgacatgttgattattgaccgggccgccgggtgctgaggatgcctctgtcaaaatccgtccgttccaggcaaacgtttccgcttctacccggtgatatggattcaaattggatagctgtttgacacctgcaaaatttgccgctacctcttgcagggagccatctggattgtgcacaagcttattaatatggggagaacggtatcctttgccggccccgtaaagagcggagctgacagtttgagtatgatacaccacataccactcgtttttaaaattgaaaacagcatggtgattgttcccgccgcctccgaaaaatgctcccggatttttcagaaagtgccctctatacgaaaaagaatccataggacttgagctggtcatataaccgatctcacctggaggtttatcggccgggtgcgcgcccccgaaattgatacaataggaatagtaatattttccgttatacttatgcattcccgaatcttcaaacataaaaggcgcatcaatcgtagacgcacttccggcaacactggtcatatcaggacctaatttcatgactcttgctgttttaggattggcccattgcccctgcgttggatttgaaccgcccggaacgcctccgccggcatataggtaaccggtaccgtcatcatctacgaatactgcaggatcaaaaagccatacaacaccggacattcctggcgtatttggcgttaccagcgcttttccgatcggatctgtccatgggccggtcgggctgtctgcggtgagaaccccgatacctccgccgccgtttgcgaaataaaggaaaaatttatccttaccattgatctttttcaccgcggctgacggggcccatgatgctcctgcccatttggcaatcccccggccgccattcgccccattggcacccgctgcgggaatcgttccgtgatctgtccagttcaccatatccgctgaagatatgacggatattttattcaaattggcaaatgaattatccttaatcgtgccgtcgctattatattcatagtcatcgcttgacatatagatgtagactcttccgttataggtcagcgcaaacggatctgcgcccagatgatggtcaataagcggatttgaattcccaacatgttttgcaattggagtgcttaccgcattcgcatattccccaggtaaacagctcaataataaagcaagaatcaataaacatacgctgcactttttcatctgcttaacatcctcctgtttccgcatattaggtttttaaaaaatatgataacaacaggtcatgaagaatgcgtaaaatgaatgatttttagagtgaaaacgttgcaaatatctgaccctcttttatgaaaaatgccgccggttacagtcagcggcattttgccctgaatcacttacattttgtcaaacttcgtgtcgccagcaaacgatcccattgacagttgttcttcaagaacaagtccgtgatgatgccgctcttcaatccttttaataatagatcgaattgtatccgtattttcttcgatattgtgagggtcaaagatcgtcacatggtctccttttaatttgtactcaaggtaatgctgtgcggttgattgcttccatcctctatcggtcaactcgccgcatagaaaatgatgaatgttggcgttcaccgcgccggaattgatcagtttattgtgatatgtgagatagcttctgattttatccttaatcgaaggaatggttaataattctctataataatccggaatgatatccagattccgatgaatgatctcttcggtttcctcttccgaaaaataattcaccgaaacggctcttttagaatcaagcatcataatgtccgatacgatgcgtccgcgcttctctaaggctttggtaacctcaaaagccaaattcgaccccgaggagtaaccaagtaaaacaaagggcccttgttcctgaatgcctatcatgctttctgcataccggtcaacgatctcttgctcgtaagacggctcttctaggaaatcagcggcatagacgatgcagctgccgttaagtcttttcgccatttcattataaaccagcccatatccgattaaaggcgggaaacagaacacagggattgaaccgctctgattcatcttgacgaatacgttatccgtcgtggacttgaaaactgccgcttgaatggcgcgtgccattgtttcgatggtaggaaaatcgtatacggcttgataatgcattttgattcccatacggtcgttgatttgatgaataacttgcaatactttgagcgaatggccgccaacgtcaaagaagttatctttaattcccggctcactgatagctaaaatgttctcccatatctcggccagctgcttttcaactaacgttccgggcgcttcgtattcggttccggtgagcctatttccctcaggagccggcaaagcttttcgatcgatttttccatttgcggttatcggcatcttctccatttggacaaagtaagccggtatcatataagcgggcagtttattcagcaaatggctcttcagctgcgccgtatttaatgaatcgtctcctgacaagtaggcgcacagctgctttgagccctcttcttcaattgcgatgacgaccgcttctttgacagattccgattgcaataaagccgcttcgacctcgccaatttcaatccggtagcctcggattttcacctgatgatcaattcttcccaaatactcgatattgccgtcaggcagccaccgggcgacatctcccgttttgtacattttttcgcctgcggcaaacgggtgttcaacaaatttctcagccgttaattccgggcggttcaaatatcctctggccagtccctctcctgccacatagagttcgcccggtatgcccattacctgaatgcgctgatattcgtccaaaatatacgcttgcagagtaggaataggttgtccgatgttgcttctgccctcgtcgatttcccgttccgtgatttctttatatgtgacatgaacggtggtttcggtgatgccgtacatattgattaattgggttaaaggatatttaagcttccagtctttcaagaaggatggatttaacgcctctccgccaaatatgatttttcggatgtttaaattggattcgggatctgctctctcctcctgcatcagttggtagaaataacttggcgtttgatttaaaatggtcacagcttccgattttaacaattgcaaatacctttccgggttttttgctatttgtttcggaacaatcactaatttgcccccatacagcagcgctccgtacatttcccatactgaaaaatcaaagcagaaggaatgaaacaaagtccatgtgtccgatgcgttaaaatcaaaaacatttttgttgttaaataacagacgaaccacgtttttatgttcaatgagcgtgcctttcggattccccgttgttcctgatgtataaataacgtaggctaattgatttggcattacgttcagattgagattagatgcttcggcgccgtatgatgacggatcgtcaaggaagacagtatgactttgataatcggtaccttccagaagatgatgctgcaataataagatagagacgttagaatcctcaagcatataatggatgcgttctttcggataatccggatcgatcggtacgtaaacgcccccggctttcaaaatagcaaggatgcctatcaccatctccggtgaacgttccgccataatgccgacaagctcctcggcctgaagtcctttggcaaccaaggttcgggccagctgattggcgcgttcatttactacccgatacgtcagcttcttatcttcaaaaacaatcgccgcttgctccggcgttcgctccgcttgttcttcaaacaattgatgaatcgtcttttcctttggatactccgccgccgtatcgttgaacttgtctatcaggagcgatcgctcatccgctgttacgatatcgaggtcttgaacgcgaatttcctgatcgtccgccatttgcttcatgatttgtatgaaatgcgtctgcatccgttcgacacttgcttggtcataaacatcgcgattgtatacaaaacgaatgtcaatttctccatccggcatcactataaaagtaaaatcgtaatgagtatgttcttccatatgaaaatcgagaatgtctaatgcgttgtcatcctgcttcatatgttctatttgtttttcaaccgggtaattttcaaataccataatatgattgatcaactgctgcttttgctcagtttgagcctgaatgtcatacaacggaaatgtatcatatttttgagaagccagtgcccgctcctggttcattttcaatacttgtgcagctgtcatttcaggctgcgtatgaatacgtacgggaatggtattgataaataaaccgaccatggtttcaattcccggaatttctgccggtctgccggatacgacagtgccgaagacgacatcctgactcccgttgtatctttgcagcaataagccccatgcggtttgtatccatgtattgacggtgacttgctggcggcttgcggcccgtttgatttcgtctgtgagccgctttcctaaacgaaactcatgctcacctttttcgtatcctttcgcccggtcggaagtttgttcttgtaacaaaacagtctgcccttcataaccttctaaatagttacgccaataggctgacgcctgcttgtgatcttgttgatccagccattcgatatatcggctgtatggagtgacggctccccgcttcggctgcctttgctcgagtatcgcataataggtttcaaacacttctttcgtaacaagaggcaaacaccagccatccattaaaatatgatgaaagctccatatcaatcgcgcttggtcttcttctgtccgcaggatcgatacgcgcattaaagcatcccgggtgagattgaatccccgcgccttatctcttcttgcaaaatcggcaataaactcgctgcgctgatgactgttcatgctgcgaatatcttcaacggccgtttcaatcggcttttgccggaatacaatctgcaaaggctgatctttccattctgtataaaaaagagtccgaagaatgtcatatttttcggccagatgcgccaaactcatcctgaatgcatcgatatccaagaaacctttcagatcaaaagcggcttgttcaaagtaagcttcggaagccgaatcgatcaagctgtggaacaacattcctttctgcatcggggttaatgggtatatattttcaatgtcaccgagatgactcgtttgctgcacaaattgatctaattcaccgatcgttataccttttaacgaaatatcgcttggcgtcaggtgaatttgatcttgagcatcacaatgtgcgatgacttgctgcaggctgctttttaagagatcggcacaggcttccattgtttctctttgatattgtttaccgcaatagctgatggccagcgacaatcggccgtctgaaatcatgccgttgatatcaagtgtataggtcatggtacgattgtcactggctgttttcccgcttgagtaaggggatatctccatcctgccgttccggacatcttgatcaaattgacccaaataattgaaacgtatttccggatgtccggtccattcatgtgccttcgggtgatcggacaaatatttgatcaggccgtaacctattcctttttgggggatctgacgcaaattttctttcactgttttaatccgctgcgggatatcctgatcagctttgatttgaagcgaaaccggatataggcttgtgaaccatcccaccgtacgcgaaatatcgagatccggaatgatagactctctgccgtgtccttcaagatcaatgagaatgtcttcatatccggtccaacgatgaatagcagttcccagaccggtcagtaataaatcgttcatatcggtcgaataagcccggtgagcgttttttaataaacgttcggtttcctcaacggtccattgaacgatgaccgtttccttgtctttggccagaccggtctcctgttcattgtcctttggcaatgtaagttgcggattatgtttctgtctgaaccagtattgattttccgcttcgaattcctgactttctgcataacgattcaactgttcagcccataacaggtaagagtccgttttcttcggaagccggatcgcttcgccgttttgaagctgctcataagctgctgctatatcctcaagtaaaatcctccacgatacgccgtcgatgaccagatgatgaaccgcaatcagcaaatgatctccctcttgacaccggaacaatcccagtttcatgagcggtccttcggctaaatgaatggattgctgaatctcattggaaatggtttctatcgtctgggacacatttttttcttcgcgtagtgagatcacttcaaggctgaacagatcaccttcatcgatcccgcgatttcgggcttcatatccatcttctgtcggaacatagaccatgcgcaaagcatcgtgatgctctgtgatcttcttcatgacgtcccgaagctttgattcatccagtccctctttccaataaagcataaccgcttgattgtaatggtgtaattccgggtatttctggtcaaaaaaccaatgctgaatcggtgtcagcagcgcccggcctttaatttccccttgttctgcgattcgggttaccggctctacgtatggaacaagctcagagatcgttgggtatttaaacaagtgtttgatttcaaacttatacccggcttggtataatcttgaggacacttgaatcgacttaatggaatcgccccccaattcgaaaaaatgatctgagattccgacccgttctaagcctaagaccgactcccacaccgcggccagtattttttccagttctgttcgaggagcttcatagttcatgcctgtaagattctctcttggagaaggaagggatttacggtctattttcccgttgaaagtaagcggcatctcttccagctgaacgaaatacgcaggtatcatataggatggaagctggcgggacagctcttcacggagctcgcctgcagttaaagcatgttgtgcggtataataggcgcacaaggatgtttccccctcgatttcccgggcgataacgatggcttctttgatcgccggcagctgaaaaaaagcgccttcgacttcgccgatttcaatgcggtaaccgcggattttcacctggtgatcaatccggcccaaatactcgatattgccgtcaggcagccatcttgccaagtctcccgtccggtatatccgttctcctgatgcaatcggatggtttacaaacttctcggccgtcagttcgggacgattcaagtagccccttgcaagcccatcgcccgcaatgcacagttctcccgccacaccgatcggctgcatatgttccaaatcagcatgtaatatatacaattgaatgttggaaatcggtttgcctatcggaatcgatgcatatgtttcttccgtctggcaatcaaagtatgatacatcaattgttgcctcagtcggtccgtacaagttgatgatttgagcctggctcaccgatgtgatgatgtgtttaaagcctgcgacatgtacaggcttcaaagcctcaccgcttgcaaacacatgtcttaatgacgctaatttttgtttcaacatcccgcttggcttctgatccatggattccaggaaggcatgcagcatcgccggtacaaaatgcattgtgctgacacctttttgtgcaattgtatctaaaatcagctcgggattcttttctcctccgtttggcaacagaaccaatctggaacctgatatcgtccaccagaacagttcccacactgatacatcaaaggtgatcgcagttttttgcagaatcgcatcccgctcatcgagagggtatttttcctgcatccacaccagccgattgatgaccgaccgatgctcaaccataacccctttcggcttgcccgttgaacccgatgtataaataacataggccagatgatccggaccagcagccggctctacattcgacccgtcttcacaaaagttttgcggatctttcatatccagcacttttcccgtaaaaggtactctctcttgcgattgattctgcacgagtaacaacttcgtatccgaatcctccaatatgtatcgaacccgttcctcgggatagcccgggtcaatcggtacatacgccccgccggctttcaagatcccgaagatccctacaatcatatccagggcgcgttcggccataatcccgaccggctgatccggctgtacgccctcagattgcagtgtccgagcgagttgattcgccctttcattcaattcacggtacgtcagacggctatcctcgtagacaacagccgtttgatcaggggtacgttccgcttgttcctccaaaaattgatgaatcgttttttctcttggatactctgcagccgtttgattataggcgatgagttgatttgtctctgagtctgacagaatattaagctggcggatcataaggtcgggttggaataacaaaatcgaaaaaatccggtttacatgttcgatcacttgcatcatatactggcgatcataagcttgttcattataagttaactttaaatgaatcgaatcattttctatggaaaactgaaataacgtatcagaagcagccgtttctctaaaacgaatggggtgaagctgatctagtgatacaatcgtgtggatcattggcaaatgatttgaatcgtagttcagatttaatggaccggccattttatcgaaaggaacgtgctgatgtaagatggctccgttcagcgtatgcttgaattcattaaaaatggatttaaacgtgctgtccgcatttatgttttgtttgattaacatgacttggtctaaacgaaggtcttcatcggtttcgtcttcaaaggtcggtacacctacaataacgccctcttcccccgtatatttgtacaaaagacactcgattccaaccaggagaaccatataaacggccattggcgatttattcgtcatcttcatgatgcgcagggatacatcggggctcaatgaactgtgaatacggttgggtgcactcgacgcatcatgctctattgctgagtccgacatttgaaacgaagggattgcactgggacgatcttccgcatcgaacatgctgctccagaacaactcctgttgcttaaattctgacattaatatccctccagtaagttttagccggctgaccgctgtccccgtaaaaacatcatgccggggacagccggtaccggccgtttttagaaattcaattcgatttcgtttgcaaagtgttcacttttatttactttctcacttaattgaatttcttttaaaggaatcgatgggtcttttatgatcgccgacagaatcatggcataatctttgctcagcgtagcaatggttttctgtttaaacagcttcgtgcagtactcaaagcttccttgaatctcgtgcggattcatcacgaaggtcagctgcaaatcaaatttggccgccgtatttgtttgttcatatggtctgaccgcgagagagtccaattcgatatccgtttgttccgtattttgcagaacaaacatcgtatcgaataacggattacggcttaagtcccgtttcactcccagtttctcgactaattcttcaaaagggtactcttgattttcataagctttcagcatcgtttcttttgtttccgttacatagtccataaaggtcttttctccagccggggccgtacggatggccagcgtattcacaaacatcccgataatatgctgtaagtcttcatgcattcttcccgcaataggcgtaccgacgacgatatcttcctgaccgctgtatttggccagcagtatgttataggctgacagcaagatcatgtaagcggtcgatccggtcaattcttccatctgttttataccctggaccacggtctcatcgagagcgaaattgtatcgctttccttcaaagcttcgaattcgcggtctggcaaaatctttcggcagctcaaatggcgggagttcctcatgaaatacgttcagccaatagttctcctgcctcttgatgcgttccctctgctccgcctgctgctgccatacagtgtaatctttgtattgaatccgaagcggggttaattctttgccgtcatacaattgaatcagttcttcaacaaaaatattcatagaagcgccgtctgaaacgatatgatgcatgtcaaacatgaaaacatgtctgtcctgttctaattcgatgagtccggcccgaagcaatggagcctgactgagatcgaaaggccgcacgaaattgcggaacagctcctcgacctcttcatcagctgctttgtacctttctatagagaaatccgcctgcggcttgatcacctgcaccagctctccgcggaccatttcaaatccggttcgtagcgattcatggcgctggatcagactttggaacgcagattgtaaacgattcatgtcgatcctgccttccaatgtcaaaatccccggcatgttgtaacttagttctccgccttcaatttgtgtagacaggtaaaccatcttttgcacagaagatacaggataaacatctttggcttctgcaacagggatttcatccggaccgctggtttccgcgcctgcaatgaccctcgccatttcttcaatcgtcgggtattgaaacacttctctcaatgaaatgcttttgtcgaattgcttatggatcttggtaacgagcgtcatcccccgtaacgaatgcccgccgagatcgaaaaagttatctttcacgccgacttgttctaccttcaatacttctttccagatgtgaaccagctgctcttccggtcttgtccttggagcaacatagtcaatcccggtctgcaagcctgcttcaggcagcggtaacgcgctgcgattcacttttccattggaggttaacggcatttgctccagttgcatcaagtatgaaggaaccatatagcctggtatttgatcggagagtttttctttaagctgattgatcggcagtgacttctcccctgtaaaataggcatacaaatcgctttgcccctctgcattttctctggccacgatcaccgcttcttgtacatgctcgatgttgagaagagcggcttccacctcgccaagttcgatccggtaaccgcgaattttgacctggtgatcctttcttccggcatattcaatgtttccatccggcaggtaacgggcaaggtcgcctgttttatacatccgctctccgattacaaacggatcggccacaaacttttcgcccgttaattcaggcaagttcagatacccccgtcctactccgtctccggcgatgcacagctcaccttttacacctataggcagcatccgatcatgggaatcaacaatatacacacggttgttgcccagcggtttgccgatcggcacgtaaccgccgtcgtcagcggatgccaatgtctccggtacgatgtgaaagaccgatgcatccacgcaggtttccgtcggaccgtatacattggttatgagcggcattgatgacccgttcgaagcgaacaattcaagcaattgcgccaccgtcgcctgcgggagcgcctctcctccaataagcatgtgccggatcgttaccccatgaaggctgtctgcagcgataagcaattgcaaatgtgacggtgttccgtctgttacgtcaatgcggtgggtgcgataatagtttgacaaggcataaccgtctgatactgatgctttagggacgatatacagtgcatgtccccctaacagtgccgcgaaaatttgcttgaccgatgcgtcgaaatagtacggtgccaacagagacacacgcaatcccgaatcataagcaccgtacacttgtccgcggatcccctccatcaaatgaaggacctggcgatgctcgatcagcgtgccttttggcttgccggttgtgcctgatgtgtaaatcacatacgccaagtgatccggtccggctgccgtcaccagattcgagccatccccgctgttcattcgttcgtcattcagcagtaaaatctctccggcaaaggatacacgatcttgtaaatggggctgtgccagcagaacctttgctcctgaatcctccagaatatagcggaggcgttcctgcggactgtccggatccatcggcacatacgcgcccccggctttcaggatcgccataatccccacgatcatttccagagaacgttctgccagaatacccacaggctggtcaggatgcacgccttcgcttcttaaaatccgcgccaggcggttggcccgctcattcagctcacggtatgtgaatcggcttttctcgtaaactgcggccgtatgttccggcgtgcgctccgcctgctcctcgaacaattggtgaattgttttgtcccttgggcagtctatcgccggttgaccccatctttccacaatctgttctttctcctgcgcggtgatcatctccagcgatgaaagcggcgcctgcggatcattcgcaatcgcctcgatcaattggataaagtgctttgccatgcgttccgcagtttcctgcttgtacagcgctgccgcgtaactgatcatacctgtaattccgtcttcattttctgccgcttggaacgtcaggtcgaacttcgccatcgcatggttgtccggataaggggtaaaacgcacatcatcgaggctcaattctccctgttctgtgttttgccatatgaacatcgtgtcaaatagcggatggcggctgaaatcccgggacacattcagcttgtccaccagttcgtcgaatggatactcctggttttcgtacgcttttaatgtatgctctttgacttcctgcacgtattcccggaatgttttttccccgaccggattcgttcgtatcgcgagtgtgcccacaaacatgccgattaagctttccaaatccgaatgggttcttccggcaatcgggctgcctactacgatgtcttcttgcccgctgtatttggcaagcatggtcgtataagcagccagcaggaccatgtacagcgtgctttcgctcttcagcgccaagcctttcagctgttccgtcaactccggtccgatgacaaactcgatttgtcctccatcaaagctccgcgcagccggtcttccgtagtcggttggcatatccagcaccggaacctctccgctgaacacatccagccagtacgcttcctgtttcttcatccgttcgctttgcatatccgacagctgccacgccgcataatctttatactgaacccgcaatggcgggaattcttttccttcatataatgaaacgaactcttcaatcaaattcttgatagatacgccatcggaaatgatatgatgcatgtcaaacagcagcaaatggcggtcttttgcaagctcgatcaatcctacccgcagcagcggtgctttctccaagtcaaatgcacgcacaaaaccatgaacgagggcttccgcctgttcttctttcgcttgagtgaattccactgcaaattggacgtcgtcatagatccgctgcaccggttctccatctatcagttcaaagccggtacgcagcgtttcatggcgctgaatcagcttgcggatcgccttctcgacaagttcccgatccagagctccatcggctctcatgacactcggcatgttgtagctcagctctccgcctttcagctgattcaaaatgtacagccgtttttgcgccgaggagacggcatagtattcttttgcttcaacggtcgggatagatgtatatgctgtgtgtttcattccggtaattgtttctgccatttcttcaattgttggcgatcggaacacttcccgcagcggcaggctgacccccatctctttgtgcagcttcgctgtcagcgtcgttgcccgcagcgagtgaccgccgatgtcgaagaaattgtctttcacgccgatacgcggaagtccaagcacctcttgccagatatgcgccagctgcgcttccgccgctgtacggggagcaacgtattcgatccctgtttgcacgcctccttctggtgctggcaatgctttgcggtcgatttttccgtttgccgttaacggcaaacgctccagttggataaagtacgacgggatcatataccccggcagttcctgcgacagcgctattcgcagctcgctcaccatcagctcggtgttcgctgaaaagtatgcgcatagctgcttttctccgtctccgtcttcaagagcggtgactactgcttcctgtaccgactctatctttaagagctgagcttccacctcgccgagttcgatcctgtatcctcgaattttcacttgatgatcgatccggcccaaatattcgatgttaccgtccggcagccatctcgccagatcgcccgtccggtacatccgtttgccgggctcgaacggatgatccgcgaacttctccgcagtcagctcaggacggttcaggtaccccctcgccagtccgtcgcccgcgatacaaagctctcccggtactccgactggctgtagacgcattgatcccggtgccatcatatacagctgtatattcgagataggcttgccgatcggtaccgatgcatacgcttggtttgcttcgcagttgaagtacgacacatcgaccgttgcttccgtcgggccgtacaggttgatcagttgggcgccgttcacaggcgtaataaggcgatgaaatcttgccgtatgtgccggcattaatgcctcaccgcttgcaaacacttgccgcaacgtacgcagtttgcttgtctgtccgctcgccgtctgtgtttccgcaaacttcaggaaggcgtgcagcatcgccgggacgaaatgcattgtcgtgatactttgctcttctattgtgttccaaatcacttcagggtctttctctccgccgagcggaagcaggcacaccttcgcaccggtcaaagcccaccagaacagctcccataccgagacgtcgaaggtgatcgctgtcttttgtaaaatcgtatcgccgctgccgatcggataagccttttgcatccacatcagccggtttataaccggacgatgttcaaccataacccccttgggcttgccggtcgatccggacgtgtagattacatatgccctatcgcccgcaccggacagcggatccaagttagaaacgtcatcatcgtaaacggaagtatcatcgagatcgatgaccgttcctgcaaaagcaacccgttctttcacgtgacgctgtgacagcagcagggtcgctcctgaatcttcaaggatgtagcggatgcgttcctccgggtaatccgggtcgattggcacataagcgcctcccgctttcaggattgcataaatcccgaccatcatttctagagaacgctcagccatgatcgcaacaagctggtcggcctgtaggccttcaactcgtaaagtgcgtgctagttgattggcccgttcatttaactcaaggtatgtcatacgctgctcctcgaatataaccgcctcatggtccggcgtccggagtgcttgttcctcgaacagctgatgaatcgtttgttcacgtgggtaatgcatttcgttagactgaaaacggctgtgcagctgttctttttcttgctgcgtcagaagttccatttcttctactttgacagacggcagctgcaatacttgctgcataagctgttcaaaatgtccgcgaatccgctctgcctctgattgttcatattcatttcggttaaaactaaaatgaacagtgagttgttcgccagggatgacaactacattaaaatcgtaatgggtgtgttcttctatatggaaattcacgatatttaaatccgcagcatcatggccctcttcaacttgctgccctatcggataattttcaaagatcatgatatgatcaattaagttttgcttttgttccgtttgggcctgaatttcgtataaaggataggtatcgtacgattgggaagccagcgcgttttgttgaaccatttgcatcgtatcagcaaaagtgctgtcctcatcgcagcggatgcgaaccggaatcgtattgatgaacagaccgatcatctgttccacatcaggaatttccgccggccttcccgacacgacactgccgaagacaacgtctgcggacccgctgtatttctgtaacaaaatcccccataacgtttggatcaacgtatttaacgtaacctgatgctgatttgcgatctgctgtaattgttttgtctgttcgtgatcaaatcggcagatcacattggcataagcgtattctttttgttcatgctgcgctattttatgaagaagcgtggtttcacctttatatccttcaagatacccgctccagtaccgctttgccgctccctgatcttggcggtcaagccactcgatatagtcgctgtaaggagctgccgatggcggttctggttccctgccttcctgtaaggcgctataatgatcaaacacttccttcgtgataagagacaggcaccagccatccatcacaatatgatggaagctccaaatcaaatgatatttgcggtcttccatacggaaaatcgctatgcgcatcagcggatcccgagccaagtcaaatccttttgccttgtcttctctttgataggctgcgattgcatcctctctcaggtgctcctctatatcacgcaaatctgcaaaatgaatttgcggtgtttgcgttttatagacaatttgtaaaggagtatcgttccagccgctgtaaaaacgggttctgagcacggcgtatgtttcaaataatcgttcaaggcttgctttaaaccaatcaatctttaactctccctgcaaatcgaacgatgcttgttcaaaataagaacttgaggcctcgtccagcaggctgtggaagagcattcctttctgcatcggagtgagcggatacacgttttcaacctcacctgcatgcggcagttgaatgaggagctgatccaattcgtcaatggatatgccttttaacaaaatatcgcttggcgtcagttccgattgttctttatgaacgcaatgcgtaatgattgtccgcaggcggctttgaatcgtttccgataaccgcatgatcgtttcttttgcgtactgtttgctgctgtagctgatcgtaagcttcagccggccctcggtgatcattccgtttatattcaatacatacggtctttcttgatttccgcttgagtctgaaccgcaagaataagaagataactgaaccccatgctgctgtaaatcttggtcaaactgtcccaggtagttaaagctgatctcaggattgagtttcgatggcattccgccgcttaagtaccttgctattccatatccgatccctttatacggaatttggcgcaatccttctttggtcgtcttgatataatcagagatttctttgcccggctgcgcgtgcagcacaaccggatacagacttgtaaaccacccgaccgtgcgggagatatctatatcttgtataatctgttctcggccgtgtccctctaaatgaatcggaatttgttccagtcctgaccaatgcgatatggaaagacccagagaagttaaaagcaaatcgtttatttccgtgtgataagcgcgattcgcttgttttaataagagctccgtttcctctttcgtccattccacagttgctgtttcgctgtcttttgcagttgtatgggtttcatgaaaatctttaggcagcggtttgacttcggtttgttcgatttttgtccaatattcctgttcttgttttatggtttcactttgcgcatattctgacagtctcttagcccataattggaaagagtctgttttttgcggcagttgaatcactcgcccgttctcggcttgcttgtagccgctaacgatatcttccagtagtatgcgccatgaaatcccgtctataatcaaatgatggatggcaatgagcaaatgatctccatctgcgcattgaaacaacccggctttcattaacggcccatcacttaaatgcatactgctttgtatctcatcagctttggcttcaattgtacgtcccggatcgggatcttctttcagattcatgacttctaagcggtacagtccgctttgggcgatttcttcattctgtgcctcacagccattttccgtagtccggaacgtcatgcggagcgcatcgtgatgttcagcaagcttttgcagggtttgacgaagctgcgtttcctgaaaaccttccggcgcatgcagcatgacggcttgattgtaataatgctgatctgttgttgtttgttcgaaaaaccaatgctgaataggagtcaggctgacttttcctttgacctcaccttgatcggctatacgcagattctgcttgatatgcggactcaattctgcaattgttgcatattgaaacaagtctttgatttccattttgtatccttgctgatttaatctggaggatacttgaatggatttaatggaatctccgccaagatcgaagaaattatcaagaatactgacgttttcagcgcctaataccgattcccaggcagaaactaatatttcttcagcttttgttcggggagctttatactctgctctgtcctgcagttcgaaatccggagccggcagcccttttttgtttatttttccgttagaagttaaaggcatttcatcaagctcgataaaataagccggaaccatataacttgcaagggtttgagacaattgtttccggagccgggctgccgttgtttgcccgccgctcacgtaatatgcacacaattgtttaaacccgtggacgtcctctctggctgtaacgacagcttccttaatcacttcttcttgaagcagtgccgcctcgatctcgcctaattcgatacgatagcctctgattttcacttgttcatctattctgcccgcatattcaatgtttccgtccgccagccacttcgccaaatctccggtcttatacatcttcgctccgggttcaaacgggtcatcgacaaatttctctgccgttaattcgggacggttcaaatatcctcttgccacaccggcgccgctgatatagatctctcccgggacaccgatcggcgcgggtttcatattctcatcaagaacgtaaatgctcgtatttgccgcagcggttccgatcggtactgattcccgcctgtcctttgcggcatcataacggtaaatcatgcagccgacaacggtttccgtcggtccgtactcattgcatatttcaatccggccttcgaactgttcatgaatgctgcgggctaaccgggtgcttaagttttccccgcccacaatcattcttcggacagccgtttgatcggcaatgttcatttctttcaagacctgcaaatgggccggggtcaatttaatgatatccaccctcgggtcccgcacaattgattcaagcagagctgttttatcctctccgtcatagacgatgattgcattgcctgtgacaagcggcgtgaaaatagaagtcaccgtcagatcaaaagaaattgacgaatacaatgggaagttggctttctcgccttttacataaacttctttcgcccaccaaatataattggtcaagcctccgtgctcgattagtacgccttttggccggcctgtggaacctgacgtataaatgacatatgccaaatggctcacatcacttatcggagcaaggtcagagccatcttggtgataagaactttcatcatcaagtaaaaccgtgacgccttcataggcaagctgtttcctgacgtcccgctgcattaaaacgattccggcttgggagtcatccagcatataccggatgcggtcttgcggatattccggatctataggtacataggctccgcctgattttaaaacggcaaggattccgaccaccgattcgatgctgtttcttgtgatgatggctacaggctgatccgtctgcactcctttcgctcttaacgttcgcgccaggcggttggcccgcttattgagctctccgtacgtgagctgcctgtccttatcaatgacggctgcttgatcgggcgtacgctgcgattgctcttcaaataattgatgaaccggcgtctgcgggaacggcgcagccgtgtcgttcagcgtctgcagaagggttcttctttcgccttccgttaacaattccgcttgatccacccggatatccgcatctgtcacgacttgatgcaggatttgcatgaaatgttcccgaacccgctctatgcttgcccgctcatacacatttgcattgtattcaaaagagatgttcatctcgtcgcccggtataacggtcaaattaaaatcgtagttggtctgttcttccatttgtacgttggaaatcgtgatggatgttccgttttggcggcctatactttccatatactgatcaaccggataattttcgaatatcattaaatgtgtaattaaatcttgcttttgcgttgtacgcgcttgaatatcgtacagtgggtgcgtctcaaatttttgggacgctacagccctttcctgcgcctctttcataagctcagcaaacgttgtcccggcttcacatcggaaccggacgggaatggtgttaatgaataagccgatcatggtttccacgtttggaattccagcgggtcttccggatacaacacttccaaacacaacgtcccggctacggttatatttctgcagcaaaaccgcccatgccgtctgcagcagcgtgttcagcgtgacatgatgcttgcctgccgtccgcttcattttcgaagtgagatcggagcttatgtcacacgtcactttttcaggaacgtatcgtccgtcctccgctgcatggtgatccttaggaaggccggtttgctcctcatatccctccaagtactgatcccaataagccgcggcctctttcgcatcttgccggccgagccattcaatatattgactgtacggagtaattgacgattgttcaggctgcttttgctgaagcaaagcaaagtaattctcgaaaatttcttttgtaatcagcggcagacaccagccgtccatcaaaatatggtggaaactccagataaaacggtatgtcttttcatccgtacgaaggatgaataaccgcattaacgcgcctttttctaagtcgaacccccgcatcttatcttctctggcatatttctgaatcatcgcttctttttgtgattccttcatctctcgtaagtcattgaattgaaaaccgatttttttcgttttgaatatgatttggagcggctgatctttccagcctctgtaaaaattcgtgcggaaaatatcatatttttgcgataagccgtccaagctttttgaaaatgaatcaatttccagatctccatgcagatcaaacatcgtttgctgaaaataagcacctgaattcggatcaaataagctgtgaaacagcatgcccttctgcatcggcgttaatggataaatattttccgcttcgcctaattcacgcgtctgctccaaaagctgttccagttcgtcgattgagatgtcttttaacaggatgtcacttggtgtgagagaagtctgctgccggcttacgcaatgtgcaatgacttcttgcagactttctttcaacccccgggcaaattgagccatagtagatctttcgtattgtttgctgctgtagctcagtgtcagtgataatgtcccttcggcaatcatgccgttcaaatcaagcacggccgttctctcttggttttcgttcattgataaccctgtggaaaaaggcgagatgcgcaaagcctgatgcttcaggtcttggtcaaattgtcccaaatagttaaacgatatctccggtttcagctgcaggctgtcggcttccggatgcccggatatatatttgatgatgctgtaattcattcctttgtcagggatacggcgcagcccttctttaacgatcttgatccgctgcgacaggttttttccggcttccatcctcaggacgacagggtactggcttgtgaaccatcctatcgtgcgggaaatgtcagcatccggaataatcggttctctcccgtggccttccaaattcacgacaatgtcttccgtgcctgtccacttgtgaacagccagccctaacgaagtcagcagcagatcgttgatatccgtgttgtaggcgcggttcgcttgttttaataattgctccgtttcctcttttgtccattgaatcgtcacttcttcgctgtctcttaataacgacccttcgctgatagtgtccttaggcaatggctgaggctttatacttgaaagctcagtccaatacgcaatctcctcttccatatcggtttccgccgcatatttggacaattgatcggcccagaatggaaacgagtctgttttttgcgggagctggatcgtttgtctgcgttctgcctgctcataaccgcttgcaaaatcttcgagcaaaatacgccaggatacaccgtcaatcagcaaatgatgaattgcaatcagcaaatgatctccgtccggacattggaacaaaccgagcttcatcaatggccctttgtctaataccatgctgctttgaatctcattcgctttatcggcaatcgcttgagccggatcggtttcccctttataattcatcacttccagatggaatagttcactttcatctgttcctgtaattcgcggagcgtatccgtccggcgttttttcaaaaatcatcctcaaggcatcgtgatgcgacgcgatccgttccatcgtccggcgaagcgggccctctttaaagccttccgccgaatataacatgacggcctgattgtaatggtgtgcatgcggcattttttgctcaaaaaaccaatgctgtatcggggtcagcttggttccgccattcacttctccttgatcagccaccctgctgaccggtgctacaaactgactaagttcagcaatcgaggggtgtttaaacaaatgcttcatatcaaccttgtatccggcttgatacaatctggatgacacctgaattgatttaatcgaatctccgccaaaatcaaagaaattatccaaaattcctatacgttctgcccctaatacttcttgccagatagacgccagcagttcttctattgtgttccgcggggctatgtattcgttttccgcccgcgtattttcgtcagcagcaggcaaagctttcagatcaatcttcccattggaagtgagcggaatgcgttccaaagggataaagcgggagggaatcatataattcggcagttcccgggataattcttctctgaactgcgcagcggtcaaagaaggctcgccgacataataggcatacaattgtttggccccgtctgcgtcttcccgcgcgacgactgcggcttcacgaacgttttccagattgaacatggctgcctctacctcgccgatctcaatccggtagccgcgaattttcacttgatgatcaatccgccctaaatattcgattcttccatccggcagccatctggcgagatcccccgttttatacatcttttgaccagggacatgcagatgctccacaaatttttcctccgtcaattcaggccgattgaggtagccgcgggccactcccgctcctccgacatacagctctcccggtatgccgatcggctggatttgatggtgcgctcctaaaatataagcttgatggttggccaccgggctgccgattgtgatctgttcatcagcggactgaacagggtgaaatgtagataccacgctgttttctgtcggtccgtattcattattgatccgaatgcgaggctgcagagaatgcagcttctcaactgtatctgtttccagctgctcaccgcctacaacaacatgctgaacatggatgaaatcctctctgttcatctgttcaatcatcgttttcagaagacggggggaagttgaaaaatgggtaattctctcttgttttatggcattttgaatggcgaaagtttctttattctcttcattaggcagaaggtgcaaagttgctcctgagatgagcgggccgaagaaatttaaaatgaacgcatcaaaaacatacgggtacaagacaagcacgcgatccgccggagaatgcttgaaaaacgccttcttccactgaagcgagttcacaatgccgccgtgttcaaccatgacccctttcggctttcctgttgtacccgacgtataaatgacataggctaaatggctgtgtcccgctactggtgataacaatgagcaatcggcatggtatgatgcttcatcattcaaatcaatcaccgggccgtcaaaggcgaggctgttttttaaatgatgctgaacaaggagaacgtctgcatccgcatcatgaagcaaatattgaagccgctcttttggatattcaggatccaggggcacataagcgccccctgccttccaaacagctataatggatacgatcatctctaatgaacgatcagcgagaatggcgactaacgtatcgggttgaaccccgcaattacgcaatgttcttgccaaacggctcgccttctcatttagttccctgtacgtcaaatggtcgtttttaaatttgacggccgcattctcaggcgttctttctgcctgctcttcaaataattgatagactgttctgctcccggagaaatctctgacggtgtcgttaaaatcaaacaatagcttctgtttttgcgcttccggtaagatctctgccgtatggatcgcggcttgaggctgaaacaggatcacagacagcagctgatccaaatgggatacaatttgattgatatagcgctcatcgtacagattgccgttataaaaaagcttcaaatgaatcccgttgttctccaaatcaaagtgaaacagcgtatcggttgcagtatcttctttacattgcaaggaatgaatttcgttaagcgaaacgacggtatgaatcaaaggcatatgctcgtcattgtattgcacgctcagatgccgggccatttttctaaacggcaggttttgatttttcagagaatcattaacggcttctttcagctgcccgaatacggttttaaatgtgctctcgtttgaaagcgtattttttaagaggacaatgttgttaacggctgactggccggctttttgcttcgataccgttggaatgccaagaatcaggctcgttcgatccgtatatttatataacaagcattcaatacccgccaataaaatcagataggccgccatatcggaatgattcgccattgtcatgattctttgagatacttccggagataaggaacggcagatgcatttttcctggtagccggtacggaccaacgacgctttatccgctgctttaaagtaagggaatgcgcttagaccgtcttcttcatcaaacaggttttcccagtacgtttcttgagttttaaataccgacattggagcacctcattttatatattttaaagaaataatgcttttccctaaaagttcaattgaatagaatcaagcgcgttctcttcttcctcattgctgccgctcaatccgatatgttcgattagaatgcttggctgttccaaaatcgccgataggatgtgtaagtagtcgtttgataaaacctcgattctgcttttcttaaacagttttttcgaatattcaaacagtccgtgatagttgtcgcggtccgcctgaatcgacaaggtcaaatcgaatttggcaaccggatgatgaaatggatacggcttgagttgaagggaatcgaaagtcaattcagcatgatcaagattttgcagcacaaacatcgtatcgaataaaggattgcggcttgaatcttttggaagatgcagatgctgaattaattcttccaacggatagtcttgatttttataggcgttcagcatgttttcttttacttcatttaagtaggcatcaaatgttttacggcccgccgggtgattgcgaatgactaacgtattgacgaacattcccacgaccggctctacatccagatgagtccgcccggcagatggcgttcctacgataatatcttcttgtccgctgtatttggataaaagaatcgtataggctgccaataaaatcatatacagtgttgctcctgtgtcttcttccatttggcttaaacgctgtttcaagtgttcgggtataagaaattcaaatgattcgccttcgtaatcgcgtatggcaggtcgctcataatccgcaggaatatccagtacaggaatatcaccgtgaaactgatccagccaatacgcttcctggctcttgatgttccgtttctgaatgtccgattgctgccaaactgcaaagtctttatattgaatagagagcgggtccggttcgttcccctcgtagattcggcttaaatctttcatcagaatattgacggacacgccgtcagaaatgatatgatgcatatccaccacaagcaagtgccgcgcaggttcaatttcaatcagtccggcccgcatcagcggcggcttggctaagtcaaacgctttgatgaaatcaagcacacggtcttccgcttcttcttcgcttgcttgaatccgttctatcgtaaagtcgacgttctgatgaatacgctgtgccggctcgccttcatataaatcaaagctggtacgcaacgcttcatgacgcgcgattaattttcggaaagcggcgtttaaccggtcgggatcgatcgtcccttccacattcatggcacccgtcatattgtaagtcagctcgccgccttctgtgtgacttaataaatacatccgcctctgagctgaagaaaccggataatatggcatttcctttgcagccggaatcggtacatatcgatttttgtccatgtgtaacgccttgtcagccaattgttcaatggtaggaaacttgaatatgtctttgagagacagattcacatccagctctttgtgaattctggcggctaaggctgccgctcggatggagttgcccccgagatcaaagaaattatgtttgatccccgcatggcttattccgagcacttccttccataaatctgtcagtttggactccgtctcattacccggcggaacatattcagctgtctgctgcagactcgcttccggtgcaggcagcgccttacggtttattttcccgttggatgttaacggcatatgctccagacggacaaaataggacggaaccatgtagtccggaagctgggatgacaaatgttccctaagctgcgcagccgctataggcttgtcgcttacgtaatacgcgcataattgttttaagccgtcttcttcttctttcactgttaccgcggctttttgcaccgcttccgcgttatgcatcgctgcttcaatttcaccaagctcgattcggtgtcccctgattttgacttgttcatcaacgcgcccaatatatacaagatttccgtccttcaatcgcttagccaaatcccctgatttgtacattttcgctcccgggacatacgggttttcaacaaatttctcttccgttaaatccgggcggttccaataccctctggcaacacccggtccgctgatatatatttcgccgattaccccgatcggaaccaggtttctgcttgcatcggccacataaatatccgtgttggcagccggagtgccgatcggtacaaattcccgcttgtcccgttctgcgtcgaagtgataaatcatacatccgacgacagcttccgtcggtccgtattcattgaaaatgtccagccggcctttaaactgctcgctgacacttttggccagacgggtgcttaaattttctccgccgacaatcattttccgtatggcggtgccgccagcgatattcatctccttgatgacgtgcagatgtgccggggtcaatttgatcatgtctattcttgagtcccgcataatctcagaaagcacagcgcttttgtcttcgccgtcaaagacaatgatggtatttcccgtaaccagcggtgtaaatatcgaggtcacagtcagatcgaaagagatggaagagtataatggaaagttggttttctcacctcttacataaacctctttcgcccaccaaatataatcagccagcccctgatgctcaatgagtacaccttttggatttcccgtcgaacctgacgtatagatcatgtaggccaaatcatgcgcatcgctgtccgattcaagattcgagtgctcctcatggtatgagttttcctcatccaaaagcacaatgtcaccatcatacggtaattgatccagcaggctgcgctgtgtcaacacaacctccgctcttgaatctctcagcatatattggatccgatcttccggatattcaggatcaatgggcacgtatgcgccgccggctttcagaacagccaaaattccgacaatcagctcgatccgatgcgggctgatgatggcaacgaattgatccgcttgtacgccttttgtccgtaacgtccgcgccaatcggttcgcccgttcattgagctgtctgtacgtataccgctcattgccaaaaataacggcttcatgatcgggactctgttccgcctgcatttcaaaccaccgatataccgtttccttatgcggatacggcgtctttgtgccattacactccgtcagcagttgatgccgttcggtttcagacagcataggaacagaagacaatgtcatctccggctgctcagcaaggctgtttaaaatggcggtatagtgtctggtgatctgttcaatggtgtcttttgtgaatcgtcctggtttataatcaaaatgcatctctatctgttgaccggcatcttcgatcgtgagcatcaaatcatataaagagacccctggatttcgttctttcactttaaatgtacattcattgtgccggatttcatgaaattcaatgttttgaaacacaaacatcgtattaaacagagactttccggttgtttcccgctgtacatttaatttctccacaagccggtcgaatggatagtcttggttttcgaaagcgtcaagcgtctgccgctttacttcttccagataatccgtaaacgttctattggcgtgcggcttcgtccggattccaatggtttgtatgaaaataccgatgatcttttcgatatccggatgatttcttcctgaagcaggcgtgcctacgacaatgtcttcttgtcccgtatatttatgaagcagcacattataggcggccagaagcaccgtatagagagtcgtttccgccttttgcgccaaatcttgaagcgaacggatgacatccggctgtaaggagcatgtcacacgctgtccctcagaagaccgttctgccgctattgaaccgtctgtcggcaggtcgagaatgggaatttcgtcttgaaattgttccagccaatatgtctcctgccgcttcatggcatcctcattcagccgttggttttgccattctgcgaaatctttatattcaaattcaatgtccggtaatggtttctgatgatataaagccagcaattcatttgtaaggatgttgacggaataaccgtccgaaatgatatgatgcatatcgatgagcagttcggcctgctcgttttcaatcttgatcagctccgcacgaactaacggagcttggtccaggcggaacggttttacaaaccggtctgaataggcatcaaattcatcccggctcattgtccggacatgaacgttaaaatcaacttcgttttcaagtttctgaacgatatcgccatctataatgtcgaaatacgtgcgaaacgcttcgtgccgctgcatcacttgttgaagagatgagatcagggctagctcatcgtacttccctgttattgatatgtggccgaacatattttgcgccagctgatccggttccagctggtgcaggaaatatactctttgctgtgccggcgatgtcgggtaatacgcttttttctcggcagccttcattgggaggtgcacgactttcgtttcgttctgaatgaaacgtgctaattccttaacagtctggtgattgaaaaattgtccaatggaaaccttttgatgaaatgtcttctgaactttggaaagcataagcgttgcctggagtgagtttccccccagagccaggaagcgatctgatctgccaacccgttcaaggccgaaaagttcctcccaaatccgcgccagctgccgttccgtttcatttaccggcgcctcataggcttcagtaaaatttgccgtattgcttcctattgaagagatccgcttctggtgttcggcgtaaagtgcttgtaaatcatgctgttcttcatcggaaaacatcatcatggcgtcaagagggattgaatctccctcaaccattttttgcagcaattttgtaaaacccgctccccactttttcatgatttccggactgacgacgttcgtattaaagtcgaaatcaagaacatattcttgatgcgcgtctgttatgttcagaaataaatcgtacagggtgcattttaccgggtatgcaacgggctccgcctccgcctttccgaaatgcagctttcgaaaaggcctgtctaaattaaagataatacgcatatccggcacttgatcgtgcggaagctctctggccaccagtgtcatcgggacggcttggtgccgcattgcaagattcacgctttctttcatactgccaagataaccggataaagtgctttctgaagaagacgtgttcttcaccggaatcatattgacgcaatttccaatcagatcatgctgtttcatatgcgattgacctgctgcagggaccccgatcacaaggcctgactgtttggtaagccggtgcagaaaaagatgaaatgcacccagcatcgtcacaaatacgctatttttcatctgaatgcttaatgaccttaaagcctcgctcaatggccgtccaagcctgacggtacaccggtctccctcatacccgttcggataacggacagaatctgtgcttggcagaattggctgctgtatcggctcagagaaatgacgccgccaataacggaccccttcttcataatggccgctgtcaatctgtgcctgctgccagtctaagtattggcgaaacgaaacatctgcctctttcggcgaaatcggttttccttgtactattgccgcgtagttgctctccagttcttgaacaaaaacggcgattgaccatccatcggcaatgatatgatggaacgtgagcacaatcagatgttcattgtgagccgatgtaagcacatggattctaaacaaaggtttttgttcatggaaatgaaacggccgcttggcatcttctgtcagccatttttggatttccggctcccgatgttcatgcgggtgaccggtaaaatcaatgacaggtatttctatattcatccgttcctgcacttgctgtacctcgtcatcgggatgaatcaccgtacgtaaagcttcatgacggtcaacgatatgccggacggcttgttttaatgatgtatactgcagttcgcccttcactttcagcataatggactggtttaaagcggcggaagcttcattcccgtaatgggatgccataaccaactgcttttgttcaggtgaaagctcgcgcgtcccggactttttacggcctccgccatcaggggaatccgggccttccggaataaatccgcctcggcgaagatcctccaccgtgtctttcaccgcttgaataatattttcgatatcatccgcggtatgcgccacagacaagaagcagttgcgtccctcccatacatagacccctttatagttgagatggtaaaagaacaagtcattatcaagcgatgagacaaaccggaataaagaaccgaatcgaaccatgcggataggcacttgcgcttgttcgaagcagcgattcagctcatcgaccaggtaggctgttttttgattaagctgctcatacagatgttctccttcggtttgtaaatggcgaaggacggctaatgacatcctcatggtaagcgggtgagtattgaaggtgccggccacaaacgtgcgtttcgcctcgtcttgcgggtaggaatcgtccccatactgccaggtacccccgtcgatcgcattcatgaactcagcttttccggcaactacccctaacggctgtccgccgccgatgatttttccgtaggtcactaaatcagcctgaatgccgaaccattcctgtgcgccgccaagaccgatccgaaatccggtaataatttcatccataatcagagctgttccggattgctgcgtgatcgcccgcaattctttcaaaaatgcctgcggctgcaaatccggtctgcggctttgtaccggttccaccagtacggctgccaattcatcaccaagactgcggatcacgtccagcgaatcgggattgttgtaatgtaaaataatcaaatcatccataaagctctgcagtatgcccggagccagcggattcgcagacgcagccccgccttttgtgccggcaacccctaatacgccgtcaaacgtgccgtgataagatccggagaacgccacgactttctttcttcctgttgccgcccgcgccaaacgcagggcaaccatgacggcctctgttcctgaattatagaaagcgaccctttccactccggtacatgtgcggatccggtcggcaacttcaccggcgacatctgacatcgggccgagcggaggcaatgatgaacgggttgaatcatcgataacctgtgtaataaaggaaggatgatgcccgaaaaggttaaccccgaatcccatggtgatatcgatatattcatttccgtcaatatcccacattttagaaccgtcagaacgttcggcgataattgggtatacgatttccttccaatacgaacggaagctggacaaattgcggttgtttgcatgagcaaatcgggtgttgtccgtatattgtttggaacctttcgttttatctgcgtatttcttgatgaagtcttctaagtattgtttttgccgtgcggtatagtgtccctgatcatgcaggttctgaggctggaaaggaacatagggtttcgcttcttgagccgctttcttttctgcagtgacggccggaggcccctgcttgacagaaggaattgatttctcttgcgccttagcgtattctttctcatcggaatgatgcccgctgtttctcaacaaattaaagctatttaattgagcttgcaaggtatcctgaattaattgattctgagaagagattattttttcgagcatatgctcttgatgaccttctctgcgatccgattcagactgcgtttctgaaatgacctgtatttcctgcgccggaacattctcttgagggggagcggatgcaaaggacgatggaacggtctcagccaagtaatctatgacactttgaaggttgttcatcgtatcaaaaaaacgatccatcggaatgtctaccccaaattcgtccgcaatggcttttttgacctgtgacagcatgatagaatccattccgagcccgataaaatgagcattcagatcgagttcctccgctctgatccctgaagcgttgctgattacagttttcaggaaggattcaatgtgcgctttcgattgattgatattcaatgctgctcctcctttcttttcgccctcgtttaagcgcaattggtcagcttcagcccagcatcggctccgttcaaacggatacaggggcaatggcgtcttttgtacagtttcaccggaataaagcgcgcgccaatcgataacggctccttgcacaaataattcggctgcgcgattcagccatgtgatccgttcatcttgcgtacgtaaacgctgcttaatcagagcggctgcttgttgattcagctcttctttatgagcaggcagcatttccttcatattcttgtaaccgatgtatacaccgggaaggtttctgtctccctgaatcaggcgggtcagcttatccgatagttcttgtttaccggatacaatcatggcaatgccatgatccaaatgagccctgcccgtacttgctgtatagcaaatggactttaatgaagcttggctgtcatccgatacatattgccggtactgctgtgcgagttcatagagtgatttttcagtatgagcggataaaacaaataggtgcggcccctgttcatcctcgggtgcatactcactttgagaaatatattcttccaataccacatgagcgttcgttccgctaaaaccgaacgagctgattccgcctcgcagcggctcatcaccggatgtgaacgctgcagcttcctgattcacataaaatggtgatgagtgaaaatgaatgagcggattaggttcattaaagtgcgctaacggcggatttttcttgtgattcagcatgaggacagatttgatcagcccgacgatgcctgccgcttcaaacaaatgaccgatgttcgatttaacagaaccaatcgcacaaaattgtttttttgccgtatacttttcaaacgctttacaaagcccgttaaattcaaccggatcgccgagcttcgttccggtgccatgcgcttcgatgaaagacagtgtttcaggagcaatgcccgcgtctttccaggccgtctcaatgacctcagtctgagctgccggattcggtgctgtaatcccggcggttgttccgtcttgattcatcgcgcttcccttgattacgccgtaaatatggtctccgtcgcgaacagcatcctgcaaaggttttagcaggactgcggccgcgccttcacctgtgccagtaccgtctgaatctttgctgaacgttttcgtgtacccgtccgaagattccatatcaagcccgatacagatcggcaagagcgatgtccggataccgcctgcaagagccatttcacaatcgccggacgttaaagatttacatgccatatgaacggcggcaagcgatgaggagcatgccgtatccactgtgaccgccggcccttttaaatttaagaaataagcgattcggctggctagcacggaagggagattgcccacgatatattgatgaagttcctccggataattcgcagaaaggagacgttcataatcgtagcccaccttcgagtaccccgcatataccccgacacggctcccgttcatgctgccgccggcatagcccgcatcttcaatcgcatgccatgcagactgcaaaaacagtctttggttagggtccataaactgagccgttttaggagctaaaccgaagaacgaataatcaaagcggtcgatttcatctaaatagccgcccttcacaaactgactctcattgaactcgctttggatggactttaaataatccgccgcatctttcagccgggattcggggtattctcgaatgctgtgctcacctttttcaagcagattccaaaaatcacttttcgttgacgctcccgggacattgagcgacatcccgataatggcgatatctttcggtgtcacatggcttggtttcgctgccgcgtcctgtttgatttcagcccggctttcagacagatatgccgctaaatcagtgatagaaggatacgtaaagagatctgaaacggcaagctcgcgtccgaatttctgttctatgcgctcggcaatctgcgataactgtaatgaatttgctcccatatcaaaataactgtcagcgaggtgaacctttttcccgttgagcacttcggaaaagatagacagcaattccgtttctatctcatgaatgggtgtctgtccggatgtttccgggctgctctccaaacattcattgatggcggcagactctgttgaaaaattccctgcctcatactgtctggcaagttcgtagcgtttaacctttccgctggttgttttagggagttttcggatcggaaggacttcttttatgctccagccgccccgcttgtacaaatgcttttttatctctttgacaagcggtgcgaatttttcaggtgattttttgtaaacaacaaagagcacgatttctccgctttgtgtcttttgatcatatacaccgcaggcggcaacccttcctaagtcaacctcttccatttcaatcgcgacccgttcaatatcgtgcgggtagatattttttccgttcacgaaaataatgtccttttctcttccggttacgactaagttaccactttcactaatgaatccgaggtctcccgtttttacccagccgtcagaagtcagcactttttccgtactctctgggttgttataatacccttgcgtcacattgtctcctttgatctggatatggccgatgattccgtcttctactctttcatttgtttcatcggagatccgaagctgacaatagtcaataggttgtcccacctcgacgaatgaagcgcaattttggtcctctttgctgacgtttacagctctttcaccaagatttaaatagtcacgatgcaaataaacgggaacgaattctttacctattttagagaacgctgcgccaaccgaagcttccgctaaaccgtaaacattcaaaatggcggatcttttcagattgaatgctgcgcatcttttcaaaaattcgtcacacagctccggcaatatcggttctgcaccgtttgcgatgaccttgatgtgggataaatcccagtctggttcgtttttcagaaatttaaggaagtagttgtacccgaaattaggagatgatagaatactagctttatgttcatgagcttttttcatccaaagaataggtctgcgaataaataactctgtaggcattagattttgattgattccggttatgaagggaacaaggtggcaggcgatgagccccatatcatgcgttaaaggcatccatgataagaaagagtctttcgaatgaacgtgtagggcagtcccaatggcgcacgtgttatgtattaagttgtgatgcgttaacatgactccttttggatctcctgttgatccggaagaaaattggataaaggcgagttcatccgcatcaggttcataaaatgaagcggggtaatcgtagatttgatcttgaatgacgtcagatttttcgtttaattgatgatggaaatcctgtaaatcgtgttctgcagcgtatttctttattttgtccaatactttttcagaggcaatcagaaagggatgatttaatatattccaaatgcgccagaccttcagtttatggtcatcatcttctccgatactgaccggaaccgggatcattcctcctaatatacaagcccaaaaagcaacgacaaatgatttgttttcttggatttgaaatacaatttcctgcttcggcttaatgccgagatgctgtaaatagccaagatacccttgcgcctcttcaaacaattggcggtaagagacaaccgtctcgtttttatcggattcgataaaacggatcccgcgatcagagatactgcttctttcccgaatgacatctactaaggtttggaattgactggtatacataggtcccctcctgggcgctttattttaaaatccgcaattcttcccaagccggaagctgtttagcttcacaaattaatttgcataaatggatcgaatgttcgagttcttgttctgaaagcacgtcttcatgccttttcattctctctttcagctcttggatttgcgtaaataatggcgtcgtcatagtggaataagccgctgaatccttgttgtaatttcgcgcaatgacggattgaatcatcaatttattcagttgttttttgcgtaaatggacaatatgtttctttctttccgttgaattggaaagcgggggaacatcagatgtctgtcctaagggataaggtacaatgtgattcgttgtttttctcagcagaccggctaagacattgttcggacccatttcgatgacttctgtgactccatgtaaaagcaagtaatgcatcgattctgtccatctaaccggcatcgtcatgtgctgcttgagatgttcgctgatcgaatttccgctgctgtaagggcgcgcggtgacatttgaaatgatcggccatgcggcatcccggaaggaataccggtgtaatacagtctggaattgttcggaggctgatcgtatcatcgaactgtgaaaaggcgcactgacattcaaataagtgtatgccgcacccttttcctccgccatcttgatgacacgttccacagcttgccggtgtccggaaatcacatgctgctgttctgaattcatgcaggctacacctgccggaaagtcttccgtcgatactttcgaacatatttcctgcaaggtttggagagagagctgtgtcacggcggccatcgtcccctgctgatggggatccgcattttgcataagaattccccgctcccttacaagtgtaacggcatcctgaaaagaaagggcgccggcacagacaagcgctgaatattcgcctaagctatggcctgccaggaagcggggcttcacccctatttcctgcatatacacttgaaaagcaatcacactgaccgttaaaatagcgggctgcgcgttcattgtctttgtcaattcattcatatctccgttaaaacacagtttttttacatccaaggagatcgcatcgctcgcttcttcaaacaatctctttgcgagcacaaaatcattccaaaattgtttgcccattcctacaaattgagacccttgtccaggaaataaaaaggcaagattgttcatgagattcctccgatcatattgaacaggggatacaatatcctacaaaatatccctttatctaacatcctagcatgattataacaaatgtgtatagaatactttcggaggagttattgttcgttttcacaaacgaattagatatatttattcataaaataaaacatgggggtttcaccgaaaatcagtcttaaagagagatgatgaaagccggggtggagcctgttaccggctcttcttcacttaggacgcgctcttcatgtttcatatgttttagggctattggcattattgtgtcagaaattacatattttctgtttattgtaaaaaatcatttgtatatctgtgaaggattgtaaactgattgcgcttgtttataaatgtggcgcaagagatggatctggatggggaaaatccgcaaggacgaaatacgccgcagaacatgcgaatgaccctgcccggataccgattgacgcagtaaatcggcctattgagtgaacaaggttttcaggcataaaaaaacagccgttcagagcggctgtttttttaaaaagtataagaactattgagcggtatacccgccatccatgactacggcctgacctgtgaccccttttgctttgtcgctggccaaaaatacggcgtaatcagcgatttccttcactgacagcagccgtttttggggaacgagcggaaagatgacgtcctcaagcacccgctcgtacggtacattccttgttgcggaaatgtcctttaactgattgcggacaagctgagtgtccacatatcccggacaaagcgcattgacggtaatgccgtcagccgcgccttcaagtgcgccgactttcgttaaaccaatgacgccgtgcttggcgctgttatatgccgctttcccgtgaaaaccgatcagtccgttgacagacgccatattaatgattcgaccgaattgctgttttttcataatgggaaatgcatgcttcattgcgataaatggcgcagtcagcatgagacgaatgagccgttcaaactgttcggtgggaaattcctcgatgggcgcgacatgctgaatgcccgcattattcacaaggatatcgagacgtccgaattgtttctcgaccgtctgcagcatatcggccacttgcttttcatttgttacatcgcatgtgatgctgactgcttcacagccttcatctttcagtcttgccgccgcttctttccccgcttgttcgtttacatcagagatgatgacggctgctccttcacgggcgaattcttttgcgatttcaagcccgattcctccggctgctcctgttacaacggctgttttttcaataagcaatgaatgcatgacggcacctcctcattttggtctgaccccgttttttaacgactggctgacagtaaaatgaccttctgttttctcaaagacctcctccattgttacaccttcctgcagttcggtgagcgtcatacggccatcatgaaaatcgaatacagccaaatctgtgatcagccgatcgaccacctgcctgccggttaaaggcagcgtacattccgttctcactttagattccccatatttattaacgtgctccataatgacaataatccgttttgctccgtggaccaagtccatggcgccgcccattcctttgatcatttttcctgggatcatccagttcgccaaatctccccgttcggacacttccatcccgccgaggatcgctacatcaatgtggccgccgcgaatcatggcaaaggattcggcactgtcaaaatacgaggctccctttacttcggtgatggtttcttttcccgcgttgatcagatcggggtcctccgttccttccgccggataaggcccgatcccgagcaagccgttttcagactgaagcaggacgttataatcattcggtatctcattggctacaagcgtcggcatccctatccccaagttcacattcattccgtccttaatttcctttacagcccgtttgatcattcgttttctgctatctctcattctgtcagcctcctttatcatgcttgccggacggtgcggcgttcaatccgtttttcatgaatcccgccgagcagcacgtgctgcacaaaaatacccggcgtatgaatttgatccggatcaagctctccggcatcgacgatttcttcagcctctgcaatcgtcactttgcctgccattgcagcgagcggattgaaatttctcgccgtctttctgaacatcaggttgcccagaggatcggctttccaggcctttacgatggcggcgttccctgtaatccctttctccagaagataggtgcgtccgtcaaatgtcttatgttcttttccctcggctactgatgttccgacgcccgcaggtgtgtaaaacgccggaatgcccgcccctcccgcgcgaattctttctgcgagcgttccttggggcaccaattcgacttccagctctccgcttaaaaactgccgttcaaaggttttgttttctcccacataggatgcgaccatttttttgatctgccggtttgcaagcaagaggcctaacccccaatcatcaacaccgcagttattactgacaacggtcaagttttttacgccgctgtccctgatcgcgagaattaattgttccggaatgccgcacaggccgaagcctcctgcgatgagggtgtctccgtccttgatcagtgcagcagcatcttgataagagtccatcacttttccttttcccatattcgtttcccctttctgttttggctacacaaggcccgtcagactgtaaatggcgatgatgacaaacacagcggctgttttaatgacggttatggcaaagatatccctgtaggattggcggtgggtcaacccggtgaccgcgagcagcgtaatgacggcgccattatgcggaagagtgtccatcccgccggaggccatcgatatcacccggtgcatgacctccggcgggatgtggaatgtattgattgcttctgtatacgctgctgacatcgtgcttaaagcgatgcccattcctcctgatgccgagcctgtaatcccggcaagcgcagtggtcgtcaccgctccgttgacgagcggatctgtaaacgtctgcgatatgccgctgctgaccattttaaagccgggaagcgccgcaatgatgccgccaaatccgtattcggctcctgtattcatcgacgccagcaaggcgcccccgatgccctcattcagtccttctttcaaattgaagaggacttttttccaatcgaacaaaatcgttgtcatgattccgatgaacagtgcgagttctactgaccagatcgcagtgacggaggaaaggtcaatcttcccgaacgcttctaaaccgagcggcgcaaaatcaaatccgtcagggtaccaatgcgggagccacatcgtgaagcatttgttcatgactcccacaaggataagcggaacaaaggcgagcacttgccgcgcggggctgggttctgcctcctgcggtaaaacaggcgtatgtgtttcattagccagacctgaggattcctctgcagcggaaacttcagattgaaatccagcatagccttctccggcattggccgcttttttgcgccgggattctaaataaatcattccggccgtaagcacaaatgctgcaccaatcagtccgagccagggagcggcataaatgtttgtttttaaaaaagcggtcggaatgacattttgaatttgcggtgtgccgggaagcgcatccattgtaaatgtaaaggcgcccaatgcaatcgtaccgggtatcagacgcttgggaatatcagctttaataaataggtttttagcaaacggataaatggcaaacaccgctacgaagagactgacgccgctgtacgttaaaatcgcacccattaagacgatggcgagaatggctctttttgctcccacaagcttgacgattgtttttgcaatcgactcagcgagcccggatatttcaacaaccttgccaaaaacggcccctaaaagaaatacgggaaaatatagcttaataaatcctaccatcttctccataaatatattcgagaagaaaggaagtacgaagcttggatctgtcaggagcacggcaaacagcgcacaaatcggggcgaataaaatgactgaaaagccccggtaagccgcaaacatcagcatgcctaatgccaataaaataataacaatgtccacaaatccccctcttttctgcttaatattagtaagcgcttacaaaaaatcgagaaaataaagcaaaaaacatgccggttttgcacagtttctgaggctgaaaaaatgtgcatcatggtgaatgttccgttttggcgaaagaaagggagactcttgctgtattagattgattggctgagcagtgagtttttttagggatagtgagatggatcagagaggatttttgctttataaatatgtattcttttttctttcatttatttcctgcaagaggaaccgataaaatccggccctcctgcatggtcattcagccaatgacaaccgggagctctttgagcgacctaaaaccaatgagcttgcggtattcaaggcggtgtgcagccagccgaagcttaggcatccgctcaaacagtgtaagaattgcaatttgtgcttcgatgcgcgctaatgaggagcctatgcaaaaatgggcgttctttccgaatgcaagatgcgggttcggctttctttggatatccattttgtgaggttgatcgaatatgcttggatcgcgattggctgcccctaaaaggatatatacctgctctcctttttttatggtcttcccatttatttcgcagtcttctgaggcggtgcgtgccgtcagctgcgcggggctgtcgtagcgcagacattcctcaactgcagtttcaataagcgaggggttttctctcagtgcgctaagctgttcagggtgtttcaataaagtaaacacaccgttgcttatgaggtttaccgtcgtctcgtgtccggctatgacaagtaagatacatgtcgcgagcacttcctcttttgaaagctgttcctccataataaacctgctgatcaagtcttgctgagggtgcgctttccgcttgtgaatcaaatctttgaaatatgacgtcagcctgcctgcggtgtcgcttgctctgactaacgtctttcttgatcgggtaagatcaatggcctggatgacgtctgccgtccattgtctgaattgatatctctcctctttcggcactccgagtatctccgcaatgataaggcttgccaatggaaaggcaaactctgaaacaaggtccgcggtttttttgatttggacttggtccaacaagtcatgaaccgtttcttttatacaagggcgaagtgattccgccgtctttgcggtaaattctttaccgataagcatccgcatccgcttatggtctgattgatttttaaataacagcatatcgtgctggatatgcgatagattttgatatttcgttgaagcttccggaagaggaatgcggtttttaaaccgaatgtctttcaaaatcgctgccgcttctttgtacccggtgacataccagcccggatattttaatacggttcctttataaacaggatcaatggatcgcagtttgtcataaaacgggtaagggtcattccaaaaatccgaatccgcatggagagacggatgtgcaatcgataggtccgccgtcatcttatacctccgtattgcaggcggattgcaggccggctttcatttcttcaacggattcgacttcaaaacctaaatcatggagcatttgatgatcctctgtttcttgctgccctgctgtcgttaagtaatctccgacgaaaatcgaatttgcggcgtaaagtcccagcggctgtagcgaacgaaggttgacttcccggcctcctgagatacggatttcttttgacggattgataaaacggaacaaggcgagcactttcaggcaatacaccggatgtaattcgcttaccccttctaacggagttccgtcaatcgcatgcagaaaattaaccgggatgctgtcggcgtcaagcgcttttaagctgttcgccatatcaatgacgtcctgtttcgtctctttcatgccgacgatgacaccagaacaaggtgacatccccgattgtttcgccgtttccactgtattgaccctgtcgtcatacgtgtgggaggtcgtaatgtttgagtgattcctctgtgatgtattgatgttatgattgtaccggtctactcctgcctgtttcagtcgctctgcctgttccggcttcagcagaccgagacatgcgcagatttttaaaccgtacgtttctttaatttctttgacagcatcaacaacttgatctacttctctgtttgacggtccccgcccgctggcgacgatacagtatgtccctatattcaggtcgtgggcgcgttttgccccctttagcaatatatgcttatccaccatccggtaagactcaatcggcgcttttgatattgaagattgtgaacagtacccgcaattttccggacacaggcctgatttggcattcataatcatattcagctttactttttttccgtaaaatcgttttctgatatgaaaagcggcatgcatcagcaataaaagatcctcatcaggacaatttaaaatggccagcgcttcttgattcgttacttccgccccgtccagcactctctctgcaagatccatccattgattcatgtttatctccccatttgtgtcagattcatgaaagaggaaacatctatatgtttctcaatcatgtgttgaatgttttccggtgaaacgtgattcagcttcggtgtgattcccaaaatcggaactttgcataatgtttcaatcatgctcgggttcgtcttttcgtccagccccgggttgctctttacgccgttgataataatgccgagaacctctatccccatgtttttcgcatattcaacggttaaatatgtgtggttgatggttccgagatcaggcctggtgacaatcaccgccggcaattccatggcttttatcagatcactgactaagtaattttcaccaagcgggacggaaatgccgcctgccccctcaacgatgaaacactcatgacgatttttgatcttactccagtgggccatgacatccgccatgctcacggatttcccctcaagcatggcggccgtgtacggcgcaagcggctctttccattcaaatggcgtaatttcttcatgagacagtgcggtttgtgacatgtctttcaagagcgaggtgtcactttccggatgagttcgcggcacaccgcttaaaaacggcttaaacactccgatatccgcctgtttctgccggaatgccgcggcaagtccgcaagaaacgatggtttttccgacgccggtatctgttcctgtgacaaaaaaacttctcatttgtttatattcagctcttttctaatggaatcaaatgcttctgtcagttcgtctatgtcctgtaagctgcgatccgccgtaacggtcagcctgattctgctttcgccttccggaacggcgggcgggcggatggccggggcgcagataccctttttctccagcagcgcagcggctgaaaccgctgtttttgcatcaccgatgataacggggataatcggtgtatctccgcctcttacggtaaagcccatatcggccagacgcgtttttatcgttttgacagacgactgcagctcacggcgcgtatcgtgcatatctgatatgatgtcaaatgccgtatgcgaagccgcacaaattgacggcgggagggccgtctgaaaaataaacgtccgcgcctgattcagcaaaaaatcaatgaaaatgtttgatcccgcggcaaaaccgccttccgttcctacagctttgcttaatgtgccgatgacaacatcaggacaaacaccgaaatagtcactggttcccccgccgttttccccgagtacaccggttgcatgcgcgtcatctgctatcacaaatgcctggtactgctttgcaagcgccattatgcggtcaagaggcgcgatggtgccgtccatgctgaagacgccgtctgtgacgatgaagcggcggttccgagcctggacggaagcaagttttttctcaagatcagccatatcaatatggcggtacacgatggtttccgcttttgataaacggcagccgtcaacaatgctcgcatggttcagttgatcgcttaaaatgacatcgcctttttgaggcagtgaggcaagcacgccgatattcgccaagtaaccgcttgaaaacaataaagccgcttccgtctgtttaaagtccgcgattgtttgttcaagtttttcgtgccacacagtatttcctgtcgttaaccgtgagccgccgcttcccgctccgaaccggctcagcgccgtttgcgcggctgtgatcagccgctcatcttttgacaggcctaaatagtcattggacgcccaggtctgccgcttttgccccttggttttgagagcggtttcctgtgttcgcagcgtccgatacagcccgtctcttttcaccgcatcgagccttccgaggagccatccgtcaaaatccacggccggtcacctcggctatcgcttctttcataatggagatcatggcttgtaactgatcggttgtgctggcaagcggcggcagaaaggcgatgacgtctccgagcggccgtgtcagcataccaagctctctcattttcaaggacaccttgtatcccatccgcttttcaggcggataaggctgttttgtccccttatcctgcacaagctctatgccgcacatgaaaccgagctggcggacatcgccgacatgaggaagctgcttcagatcatgaagaaatttcgctgccgtttttgatttttcggcgacttgatcaacgatgcgctctgattcgaataaacgcagattttcaattgccgcggcacagccaagctgatttcctgtataggaatggccgtggaaaaatgttttcattttgtcgtagtcatcgtagaaggcttcataaatggcttctgtggcaaacgtcacagcgatcggcaaatagcctcccgtaatgcctttccctgccgccatcaagtccggctggacattttcatgctcacaggcaaacatttttccggtgcggccgaaccccgtcgccacttcgtcaacgatcattaacacatcatatgccgtacacagctctcgtacgcctgccagaaagccttcaggcatgacgatcatgccggatgcgccttgcaccatcgattcaatcgtaagtgcggcaatctcttcgtgatgctttgcaagcagctgttcgagcgcgtgaaggcattcatcccggcactgtagggggtcgccgctttcagatctgtatacatacggaatcggggctttgtagctttcaaacatcagcgggccgtacacatggtggaagagttcaatggagccgacgctgacggctccgatcgtatcgccgtgatagccgttctgcatagaaataaacgtctgtttctcgggtctccctatgtttttccagtattgaaaggccattttcagagcgatttccattgcttccgctccgctgtcggaataaaaaacgcgtgtcagcttttccggtgtgatgcctgtcagcatctcggcaagttctgttgcgggaacgttcgtcatacccagcaaagtcgaatgagcgattttttcaagctgtttttgaatcgcttcatccatttcttttttgcggtggccgtgtacattaagccatactgaagaaaagccgtcataatattctttgccgctgatatctttcagcatgatcccgtttccgctttcaatgattaacggatcttcatcgtaatctttcatttgtgtgaagggcagccaaagatgctgtttgcttttttcaatcattgattgtttcatatgttctcctcccgctgaatgaatacaggctgcttctctaaaaaatggatacagctctctgtatctattgagccttctgtaaagaaaatccggcagccgctttcatctccggcattcttcatcttggcaatccgctgatatcccagcttctttgcggcaacgtagcctgttatgtaatcagggtcatctgaccagcacaattcggcaataatccccggatgtgcgcaaacttttgccgcgatggcatgtgcttcttttattcgtgaatgttccggcatgttgtgcgtaaaagcccatttttgaaaatcatgtgacggccaatccactcgtgatacccgcacacctctatttcctctgccgtcaatgcgttttcctgcccggatatcaaacaggaccgctcctcttgcttctgcatattccgcaatgttttcgtacgctttctctatcatgtgcgggggaatccccgccttttgcagaagcttgcgggcgattgcttgtcctttttccggcgtgtctgtttgatggaaagcaaccggcaaagggcggatcgtttcgatcggttcattaatactttcaagctgaatctgcataaaatcaggtatccctcttgagtgcgagaagcctttatgtaataagccatctaccgcttcctgtaaaccgctgtaagtgatgagccgttctccgccggaaatgtgttttccgccctgctcatggggggcgtttcgggaagctctcattctgacgctgtaataggtttcttcccgcatatattcccctcctttctcttactttgaaaattaatgttaaccaaaataaatttaatgttaacacttatacagaatattagtgcccttcgcggaatatgtcaacctaaactatcaaactgttaacttaataagttttgcaaagtctcattacgttttcatgttttgttcatattttagtaattgtttattcaacactgtccgctaaagtaatccatatcaacaaataggacagcgaaccgcatcttattatgaggggaggtcaccgttatgctgaaagaaaaagtaaagacagcaggccgtttttgcactgtaggcgtcggcaatacgctgatcgattttggtgtcttctttcttctcgccgcttgtcatgtcccctatcttccggcgcagatctgctcctattcggcagggatcatcaacagctatgtatggaaccggaagtggacgtttcgtgtaaaacgcaaggctgacgggaaagagatcatgcgatttctcatgattaatcttgccgcgtcgggaatcacctttttgctgctttacgcgtttcaaaaaggcggctgttcgctattggtgagtaagttcgccgccactatcggcgggatgatgatgaattttatcggaaaccgaatctgggtatttggagattcgctgaaaaacatacaggatcaggagtgaagatgaatgagaaaaaaagtgagaaaagcggtcattcccgcagcaggtttaggaacgagatttctgccggcgacaaaggcgcagccgaaagaaatgcttccgattgtcgacaaaccggccatccaatatattgtcgaagaggccgcagcgtcaggaattgaagatatattgattattacagggagaaacaaacgctcgattgaagatcattttgaccggtcggcggaattggaattcaatctgcaggaaaaaggcaagacggagacgctgaaggaaatgcagcggattgccgatttggccaatattcattacatccgtcagaaagaaccgctcggattaggacatgcggtgctgtgtgcggagcattttatcggagatgagccttttgccgttctattaggtgatgatattatggtatctgatactcccgctctttcacagctcatcgacgtctataaccaacacggcacagaaacggtcggcgtacagcccgtcgatcctgctgatgtcagcaaatatggtattatacagacggggcggcagagcggtcatgtgtaccaggttgaggatctgattgagaagccggctgttgaaaaggcgccctctcatattgccgtgatgggccgctacatattaacccctgctatttttaaaacgctgaagacgatcggaagaggcgcgggcaatgaaatccatttgacagacgcgctgcgcgaagtgtgccgcacccgaagcatttacgcgcgggagcttgaaggaagccggtttgatataggagataagttcggctgttttaaggccggcacggagatcgggcttctgcgggaagaaatgagaccgaaacttttagcttatttagaagaggtgttaaaaagagaatctgaaaaatcgtgcgttaaaaaataatttgtaaccattttgcttgtcaatcagtcatataattgggtaaaaagataaagaggttgtgaacagtgtgggcaattttattagtgaaatattatcctggctgacaagtatgggctatttagggattgcgctcggattaatgatcgaaatcattccgagtgaaatcgttctggcttacggaggctatatggtgtcagaaggcacgatcagctttatcggcgccattgtcgccggtgtgatcgggggaacgatcgcgcagtgctttatttactggatcgcccgttatgggggacggccgtttttggacaagtacggcaagtacttacttctgaaaaagcatcatgttgatgttgcggaaaactggtttcgccgttacggcgccggcgttgtgttctcggcgcggtttatcccggtcgtcagacatgcgatctccatcccggccggccttgcgaaaatgcctctttccaagtttgtcatattgacgacgcttgccattattccgtggtctgtcattttcgtttatctcgggtatcagctcgggggacagtggaaagacgtagacagctatgccggaatgtatacaactccgatcattatattggctctcgtatttattgttgtttattttgttgtgaagaaaatgagatcaagactatgaaaaaagactgcataagaacggctgcgagccggatctatgcagtcttttttttatttataccgggtatacggggtgtttccggtgtgtgaatgtcagttgtttggacatgtaagcagtgaggcgtttattgagttcttcccgcaaggaatcagcaggaacaatgccgtcaatcaccatttcagaggcaagccggtaaaggttaatgtcttccttatattcatcacgcttttcttgaataaaagccggcctttcttcaggggctagctcgctgattttgtttgcgtagaccgcattcaccgctgcttcaggacccattacggcaatttgcgcagtcggaagcgctaaacagcagtccggttcaaaagcaggccccgccatcgcgtataatccggcaccgtaggcttttctgacgataacggaaagcttcggaacagtcgcttccgccattgcggagatcatttttgcgccatgcctgatgatgcccgcctgctcaaccttcgttccgatcatgaatccgggaatgtctgctaaaaacagaagcggaatatggaatgcgtcgcacaaagcgataaattttgcggctttatccgccgaatcgagaaataaaaccccgcctttgacacgcggctgattggcgataatgccgaccggctgtccgtgaatccgcgcaagccccgttattaattcctgcgcaaataacggtttaatctcaaaaaatgagtcttcatcaatgacacgttcaattaaatccatcatgttgaacggtgcgttttgatgtgccgggatgacatctgagagcggtttttcaaaagctttcgggttcttagatttgttgacgggcgctttttcagtataatttgccggaaagtagctgagatatgtctgcgccatcatgattgcttcctgttccgtccgggcgaggagatcaccgcagcctgatacggaacaatgcatacgggcgccgcccatttcttcaagcgatactttctcgccaatcaccatttctgccatacgcggggaacctaagtacatggatgcattgccctcaaccataatgacaatgtcgcaaaaggccggaatgtaagcgccgcccgcagcggaagggccgaacaataaacagatttgcggaatgcggcccgacagctttacttgattataaaagatgcggccggctccccttctgcccgggaacatgtcgacctgatccgtaattctcgcacctgcggaatcgactaagtacaagagcggacactgaagcttttccgccgtctcctgaatgcggatgattttttccaccgttttcgcgccccacgagcccgcctttacggttgagtcgtttgccatcacacaaacggttctgccgccgatggttccgatcccggtaacgaccccgtcagccggcagtccgtctgacatgcactcggcgaaaaaagcgtcttcaacggatatgccgtcatcgaataaaagcttcagcctgtctcttacaaaaagttttcccttcttttcgttgcttgcgtgatatttcgcggctcctcccttttcaatcgttttgctgcgtgtctgccgttctttttcgtaatccatccgagtccctccatgttttattttcctttgtattcagggggtcttttttctttaaaagcgcgcaggccctcttctctgtcaagtgtggggatgacttgttcatatgcttttcgttcgatttcgagccctgtattgagatctgtctccagacccttgtttatcgcggattttgcttgtctgacggcgatcggcccattagcggcgatgcggccggccagtgcttttgctttttccataagttcaccggcttcacaaacatgctcgatcagcttcatgtcttttccctcttcggcagaaagccttcggccggtatagatcaattcttttgccgcgccggggccgataagccggggcagtctctgcgttccgcccgctccgggaatgatcgcaagccctgtttcaggaaggccgaggcccgcccggctgacggcgattctgatatcacaggcgagggcgagttcaaggcctcctccgacagcggttccgttcagcgctgcaatgaccggctgcgggagagcttcaatggatgcggccgtttcaccgatacgcctgacgctttgcttaacttgttcatgattcatccccgctctttcttttaaatcagcaccggcgcaaaatgtgttcccagtgccggtgagaatgacacaacgaatggatggcgagtttttgatgtcttcaatcacacgctgtaaatgatcaatcatgtctgaagacagcgagttggccgcatgcgggcggttcagcgtgatcagaccgatcgtttcttgacagacggaatacaagacgcaatctcccatggcttctcctttctcatttcgttctgaatgcctgcaggtttctgcttggcaggtctttgcctattttatccgcgatccagccggcggcataaagaagtttattcatgtccgtcccggtatcaatccccatttgttcgagcatataaatgacgtcttctgtggcagcgtttcctgctgatccaggggcgtacgggcagccgccaagcccgcctgaggaagtatcaaaggatgtgatgcccatatcaagagcgggaatgatattcgctagagccgttcctcttgtatcatggaaatggagtgcaatttttgaggcgggaattctcggcaaaagggcttcaagcacggctatgacctgcaaggggtttgccgcgccgatcgtgtcgccgagcgatatttcatcaacacccatttcgagcagggtgtctgacaggcggatgacttgttctaccggcacgttctgttcgtacggacagccgaacacagtggacagataagctctcgtcgccattttttcagcttttgcttcagtaataacccgcctgagctcttgaacggtccggtcaatcggtttgtttacgtttttttggttatgggtttcgcttgcagataaaaatacacatgcctgatcgattccgccttctgccgcatgctccagtccgatgaggttcggaacgagagccgcgtagaccgtatgttcagatctggcaatgccttttgcgacgtccaggctgtcacgaagagccggaatccatctcggatgcacgaatgatgtcacttcgatatagggaagacctgtttttgacagcatattgatccactcaatcttatcttctgtatccacccacgccgattcattctgcaagccgtcacgcggtcctacttcattgatgcggacatgtttcggacagttcatgctgcacctcccgttttattgaagttcaatcaggacctctccttcatcagtgaaatcaccttctgattttttcacttctttcaccgtacccgctgcatcagcgataatcggaatttccattttcatagattccaagatggccacttcctgtccttcttcaatgacatcacccggcttcacatgaattttccacaggtttcccgccatttgaatttttatgacgctcattttgacgccccctcgttcattgtttgtaaaaaaccggttgttgcctcgcccttttcaaacccttctgaatgggcaatttttgtcagcagcggaatgttggttttaatcccttctacatgatattcgccaagggcggttttcagttgttcaatggcttgttttctcgtattcgccgtgacgaccattttggcaatcatcggatcgtaaaacggagaaatgacgcttcccttttcgacggcgcattcgtgtcgcactgacgggtgtcttaaaacggaaaaagacgagatggtaccgggagacgggtaaaaggtgaccggatcttccgcataaatccgcacttctatcgcatgaccgcggtggttgatatctttctgcgagaaaggcagcgcctgcccagcggcaattttcagctgttcttccacaagatccagtcctgtaatttcttctgtcaccggatgctccacctgcagtctggtgttcatctctaaaaaatagatttgtttcttttggtcgacgagaaattctattgtgcctgcattttggtagccgatcgattttgcggctttaacggcggtttcaccgagtctttgtcttaattcatcgtcaacaaacggcgacggcgcttcttctatcactttttggtggcgcctttggactgaacagtcacgttcaaacagatgaacggtgttgccgaaagaatctgcgagtatctgaatttcaatatgacgggcattttcaatgaccttttccatgtacattgcgccgtctccaaaaaaggacgcggcccgcttttgatttccttcgaacgctttggccagctcttcttctgaatgtacgatctgcatgccgattccgcctcctcctgcggacgctttcagcatgaccggaaaaccgatggcacgggcttcggctaaggcggagtgaacatcgggcaatggctctgaaacaccgggaacgatcgggacctttgctttttgcatcgtttttcgggcttcaatcttgctgcccatcttggcgatgatatcaccgggcggaccgataaatgtgatttgttccttccggcagcgttcggcgaacaggctgttttctgacagaagcccgtagcccggatgaatggcgtccgctccggcggatttggcggcttctatgattctgtcgatatgtaaatagctttcatttactctcgatttaccgatcggataggcctcatcagccgcttttacatgcagcgcgtcccggtcggcttctgaatacacagctgccgaggggatgccgagacgtttgcaggtgcggataattcgtaaggcgatttctcctctgttggcaatcaggacttttttaaacaaatgtgaagcactcctttttcattaagttaacttgagctcttcaatcgttttttcccgcagcttgaatttctgaatttttcctgaggctgtcattggatattcatctgtaaacaaaacatacctggggactttatagcgggcgatatgttctttgcaaaaggttctgatgtcttctgcggaagcggtttgtccgtctttgagcctgatccacgccgcggcctcttctccgtatttcggatcaggaacgccgacgacctgaacgtccgccactgcgggatgccgatataacatttcctcaatctcgcgcggatagatattttcgccgcccctgatcagcatgtctttcagacggcccgtgattttgcagtatccgtcctcgtccatgaccgccaaatcaccggtatgcagccagccgtctttgtctatcgcttcttcggtcgcttcttgatttttataatagcctttcatgacatgatatccgcgggtgcagagctctccttgttcgcccctggcggcttctccggatgttccgggccgaacgattctgacttcgatatggggaagcgcgcgccccgctgtttccactcttctttcaaacggatcatctgttcttgtctgcgtaatgacaggtgatgcttcggtctgtccgtaggcaattgtaatgtcagtcatccccattttgccgatcacttctctcatgacttccgccgggcatggcgagcctgccataatcccggttcggacgtgggaaagatcatattcagaaaaacggctgtcatttaggagggcgataaacatcgtcggtacaccgtgcagagccgtgcaggcttcttgctccaccgttttcagaacggccggcggagaaaactgttcgatcggaatcatcgccgcacccgcggaaacacatgccagcacgccgagcacgcacccaaagcagtggaaaaacggcacgggaatacataaacggtcacatgaagtaagcttcatgcattctgcgatattggccgcgttatttacgatattaaaatgtgagagcatgacgcctttcggaaatccggtcgtacctgatgtatattgcatatgaatgcaatcatcctttttcaggctgtccatccttccgtcaagcgctgcatccgttacagcttcggcattatccagcaatgaatcccaacggtgcatcccgggcaggcttttatcaccgatatataacaccgtccttaaaaagggataacgtttcgaacgcagcctgccgcgctcacaagttttcagctccggaattagcttattcaccatctcaacataagatgtctgccggtaggaatccatgattatcaaggccgagacgtctgaatgtgccagcagataatcgagctctgcgatttgaaaattggtattaatggtgaccagaacggcgccgattttcgccgttgcaaattgcgccgcgagccattccggaatgttggatgcccatatggcaacatgatctcctttttcaactcccagcttcatcagcccttttgcggtttgccggcataaccggtcaaactcggcatacgtataacgaaggccgcgctcagggtaaacaaccgcttcacgatccggaaaaagctccgcggtccgctcaagcagctttccggctgttaaatggataagttcagccatatgacctgcccccttccatccctgtcttagtaaacgttttcatttcacttcaaaagctgtcttgcgatgaccattctttgaatttctgacgttccttcgccaatctccatcagctttgcgtcacgaagcatacgttcgacaccgcattccttcatataaccggaaccgccatgaatttggatggcctgaaggcatgttctgacggccatttctgaagcataaagcttggcgaatgcagcttctttcgtaaatggcaggttttgatccttcagccatgccgctttaagcaccatctgtctggcaaggtcaatttccatcgccatatcggccagcttaaattgaatggcttgaaatgacgatatcggactgccgaactgcttgcgttccttcgcatatgacagcgatgcctccagtgcgccttgagcgataccgacagccagtgccgcaatcgagatccgcccgccgtctaatgtatataaaaattgtttaaaacctttttcaggatcaccgagcaggttatcggcaggcaccctgacatcctccagcacaagttcggccgtatccgaccctctcacacccatcttgtcgtacggatttgtgatcgtaaatcccggtgtgtctgtcgggacgatgagagctgaaatgatcggttttccggcggagttctttcccgtaacggcggtgacaatgaccgtgcgggcgtaatttgcgtttgtgatccagcatttctctccgtttatcacatagtcatcgccctttttctcggcttttgtctgggttccgccggcatcggaaccggcattcggctctgtcagcccgaatgatccgagcgcttttcccgaagcaagcggaataagatgttcttgcttttgttggtcagtaccgaaatagtataatgggcttgcgccgagtgacacggccgccgcgtagctcagccccgtgctgccgcaggcttttccgatttcttcgaccgctgctgcatatgaaatggtatcaccgcccgccccgccgtattcttccggaaacggaattccgagcagcccgagttcgcctatttttttaaatgtgtctatcgggaagacggccgattgatcaacctcatgggctttcggggcaatttcatttttggcgaaatctctgaccatttcgcgcaccatctgctgttcttttgtcagttgaaaattcattaaccttcctccttctgctgctttctacattttattaatgggggtctttattcattccatccaaataaagtctgaacattcggactcatccgctgcaaaaaaactgacagcgccgcaacggtcagttttattaataatggctatttaattgtccgttttgcggagggacggctctcatggtgaagcctgtcaacggaagtaacgaaataggtgcaggcttctttcgcccgaatatcagtatctgaaaatgtctgcgtccgtgacgatgtttttctgactgtatccactaaataaggctgctttcccttttctgcgcggtaaatggcgtaataagccgtttttttaccgttggatttcgcatcttcgatatagagtgtatggcctgaagcgttcttctccgcccgtttgacagccggtttttttaaagcggaatgtccgagccaaggcatctcgggaattaatgcgggccggctgtacatgtctttgatcaaacggttttttacatcgagcggattacggtttaaatcctttaaactgaaatgcatgctgccttttatccatgctgatcccctgtttagagtaatctgccttccgtattcccccgggtcggcccaggccggatcagcgttgttgttgattttataagctgcctgcccgatatataaatgcaccggccgattgttcacttcttttccccaccaatccgctaagacgtcatatgccgccgctttaaatccgatgctccagtaaatttgcggtgcgatgtaatcaatgtatcctttttggatccattctctcgtatcagcatataaatcatcatagttccgcacccctgcggccgtttcggagcctgtcgggtcatctgcggcatttctccatacgccgaacgggctgattccgaatttgacataaggtttttctcgtttgatggtttggttgatttcttttacaagccggttgacgttatccctgcgccagtcatcaactgatgcaaagtgagcttttccgtaccgttcgtattccgcctgatcggggaattcctgtccggcaattttataaggataaaaataatcatccatatgaaccgcatcaatgtcataacggctgaccacctctttgattccatccgttataaattgtcttacttccggaatgcccggattgtagtacagctgttttccgtatgcagcgacccagtccggatgcgaacgcgcgggatgatcatctgaaagcgcattcaaatttgtgtgattcatcgtgatccggtaaggattgaaccaagcgtgaaattcaagattccgtttatgtgtctcttcaactaaaaaagcaagcggatcgtagccgggatttttgccttgtgttcctgtcagatactctgaccaaggcccgtaatctgatggataaaaagcatcagccgcaggcttaatttggacgataacggcgttcattcccatctcctgaacgtcatccagcagcttgctgtattctcttttttgctcttccggtgacagcccttttttagagggccagtcgatattggtgacagacgcgatccatacggctctcatttctctttccggctgagtgccgcttgcttgtgcggatgctgagaatgtaaagatgccggctgtcagtacaacggccaaaaaccatatcatgctaaaacggcagcttttcatgtttttccccctctctgctttacggtattccgaagcattccgggcggtgaatcagaaagcctgctttgctcctctcagcctaaaagggaaagaaaaaagtcctaaagcgaatcaaaacgcttcaggactttttatgtttcatagcggcgagcacgtcaatgaccttcgttccgacgccgacacacgtttcaagaatggcctgcgctccggcgatggacaaaatgaaaataaccggatgtgcatagcggggccagaccaagtagcagatgccgatcaatatggcgcaccagacgcccgcacaccaataacattgcagcatataaccgaatgcggaggaagggacttttttttggacggcgcgcccgttttgatcgacggttttttcttgctttataaagggttttcttatgaattccgtaatcttatcaaatacgatcaaatgggtcagccggtagctggcaagaatgatcattacatacgtaagccaagataggttcgtcatgtcaaagcctccaaaaaaactggtttgattcccctatcttgccctctgtcatcctgaaccattctgccggatgttacagattccgcgccaagcgtcttccgctgtttgcaatgatgtccagtatgatctcagcattctgctgtgcaaaggcgggttcaaacatatctttatgggcgccctcgccttgatattcctgatagagtcccgttgtggcgccttcccatttcatcggctcggtcttatcactgtgctcttcctttatgccggcctcgataaaatggaggtttgccgcgatttggccgtcatttatcagttccgcccagtacgtttgatagcgctctgtttttcggatgaccgcttccctgacggcttccgggacattttcggctgttgcgtttgttggctgcggcggcaatgtgtcaagctttctgtacgcgtctgcgataatgacgtcgctgatttctaagccgcgcttttccatcgcttttgccgcctcgaatgccgtattgccgcctgccgaatatccgaagagtatataagggccttccggctggatttccagcattttatcaatgtattgttccattctgctgtcttcttcaataaagttaaaaccgtacacagcagcccgttcgtttaatgccgccgcaagatctttaaagaaaatcccgaaacctgagataggcggaaaacagaaaagatttcggcctttcggctggttcagtctgctgatatgctgctctgcagcttctgtcagtgtgtttgaatacagcttttcagccaattgttcaattgtcggatattcaaatatcatttcaattggcacatccatctgctgcctggtcttcagctgatgaatcacttgcaatgctttcaaagaatggccgcccagctcaaagaagtcatcctgtatgcccagctccctgcagccgaggatcggcgtccaaatgtcgatcagctcacgctctacccagtttcgtggcggaacggcttttgatgacgtttttttccgttctggcgcaggcagcccgcggcggtccactttgccgtttgcggtaagcggcatacggtcaagcttcatcacatactgaggaatcatatagtcgggaagcgacctggccaacagggatcgaatggctctttcttcaacatgtgcgcctgtataatacgcacaaaggattgcttcttgtccttcgtctgacacgatgactgccgcttccctgattccatcaatttcagtcaagcgcgcttcgatttcggccggctcaatccgcttcccgcgaatcttgaattggcggtcgatacggctgatgtatccgatgcttccatcaggcagccagtgtgccaagtcgcctgttttgtagatcttttcttcaggatgaaccgggtggctgacaaacgcttcacttgttaagtcaggcctgtttaaatagcctttggcaaccccgtcaccgccgacacaaagctcaccgggcacgccgatcggcgcaagtccgccatttttatcaatgatatacgcggttgaattgctgatcggttttccgattgggatcggctgagaaaaatcgtgcctgatttcgtaaaaggtagaaaatgtcgtattttctgtcggtccgtatatgttataaaggctgagattcggacagcggtgtctgaccttattgatgagcgccggggacaatgcttctccgccgacatataaggtgtgcaacccagaaaacatctccggatctgcctgggcgaactggttaaagagcgccgtcgtcaaaaacagaatcgtaatacggttggaagaaagataattgccgaacctctcaggggcaagcattgtcgagcggtcaaccacatgaagacatgctccgttcaaaagcgctccgaagatttcaaacgtcactgcatcaaaaccgatggaccctgtcagaatgagacggtccgacatgccagccgacgtgtaattgctgtttgacacgagcgatacgacgtttcggttggaaatcatcacgcccttcggttttcctgttgaaccggatgtatacataatataggcaaggtcatcaggtgctgtatcggtattcagttttcccgcatcaggtgtttgtttttcagctgcagccgggatagagatgatgtgagaaaagtcaatgtcagtctcaattcctttttgtaccgttaacagctgtgctccgctctcagtgagcatatcggcgatcctgtcggttggcagttctgcatcaaggggaaggtacgtccctcccgctttcaatacagccagaacagcgataacaaattccggtgagcgttcggccagaatcccggcaattccctttggcgccagaccgttttccagcagggtgcgggcgaatgcagttgaccgttcatcgagctcccggtacgtcatcgtcagcccgccggcgtgaagcgcctgatggtccggggttttcttcacctgtcggctgaacaggctgatgatgctttcatctctttcataagttgttttcgtgtcattaaattcgccgattattcttgatttttccttttgtccgagcatcggaagccgatcagcgggaacatcgggattgaaggcggcgccgcgcagagcttcttccaagtgtccttttacgctctctatccatacttcatcataaacgttcgcattgtagctgaatttgatgagcagctcatcgccaggcgctatgatgaggttaaaatcgtagcccgattgttccgaaacgttgacattcccgatccggaatggtgcatccgattccttttccgcgtctttcatctgctgctgaatcggataattttcaaacacgataatatggtcgattaaatcctgtttcagctcagtctgcgattggatgtcagcaagcggatgatagctgaacgcctctgaatcaagcatttctttctgcaagcggcccagcagttctctaaagctttcgtcacccgttttaatgcgtaccggaacggtattgataaacaacccgatcatgctttccacgccgtcaatgacggaaggccgccctgatacgacggcgccgaatacggcatcgtccgtccggttgtagcgctgcagcatcaggccccatacagtctgcataagaaccgcgagcgtagcgccctcttctttggcgatggttttcagcttgtccgtcaggttttgatctatagaaaacagcagctcttccttgcggtagcctttttcctggggacgggccgatattttcgggagtcctgagggtgtctcgcagcctgctaaatatcctttccaatactcagaagccgcgtctttgtcctgatcagtcagccatgtaatataagtgctgtaaggctttgcgggcgccagtgtgacgggtgagcctgattcaatcgcccggtacatatgcatgaattcctgaaggacgatgccgaggcaccagccgtccataaggatgtgatggtggctccagacgcatacatatttttcgtcagccgttttaaacaaagaaacgcgcatcagcatatccttttgcaagtcaaagccttttaagcggtcacgttccttaaatcgctgtaagtaggcgctctgttccgcttcgtccaaatgtgtaagatcttcgcggtgcagccggaattcccgctcacgcagcacaacttggcgggggccgttcagctgagcgacatgaggtaaaaaaaccgttctgaaaatatcgtggcgtctgatgacagactgtacgctttgctcaaacaattccggacgaagccggccttttatggtgaagacggattgctcgatatatgcagccccctccttttgcagaaaggaatgaaaaagcattccttcctgcattcggctgaggggataaatattttggatattttttgttttgtccatgtgttcctcccgctcggtttagtggaagctgagtaagtcggcaatatcctgcaatgcttcctcagtcagctcccgatcatcaaagtcactgacggtcttctccgtaccggttttgccgaggcagtgttccgacagtttcaggagataatatcggcagctttcggacagccgttcgatcgtatcttgccgaaagcgctccgtttcataggaaatgctgacggtcatccggccttttgccgcaatcgcgctgatttcaagtgactgctcccgtttccatgtatctgtcacatcatctccgcctcccaaaggagaaaactgaaacgcgtcaggctgttccgtttctgccgggttcccgccgggcgcatcgaattgtccgagataattaaagctgatctccggtgctttcccgaaagtcatcccggcaagcttcggcggtgttaaatatttgaggacgccgtatccgttgcctttatccggaatgcgccgcaatgtgtctttgacggttttcaatgtgcgaatttcatattcttcaagaggttcataagctccgctccggaaaagcaccgggtaaatggaagtgaaccaccccactgtcctgctgatgtccgcacctgcctgctccgattgacgtccgtgtccttcaagggcgattttcaaagcgtgccgcggcgaccatttctgaacagcgagcacggcggaagccaaaagcacatcttgcgtatccgtattgtaggcgctgtgcacatctttcaacagggcgtccgtttcactttctgtcagagtgaaggataccgtgttccgtttttttgcaggagtttgagataaatctgcctgttcgtaaggaagactttctgtttcatagtgttcaatctcccgccaatactccgcctgctgaagaagctgtctgctttcggcataatcggccagctgctccgtatatgttttgaatgacatggttttcggaggaagtttgatttcctgtccagagacggcctgctcataagcagaagccaagtcttccaataaaatccgccatgatatcccgtcgacagcgagatgatggaccgtcagaaacaagtaatcttctgcttcagaacggaacagccccgcctgtaccagcggcccgttctctaaatccatgtttctttgaagctctgcgacgcggcgttttacaaaacgttccttctcatgctcatcgccttccatttctaatatggtcaggctgtaaagctgctcatctgcgaggtcagccggtctgttgaagaggagaagacctttctcttcgtcttttttgcagacaaggcgcaaggcatcatgatgaacggtaatggcttttaacgttttcctcagagcctcttcacctattgaatttgctctcgtcagcatgacggactggttaaaatgatttgcttccttcatgtcttgtgtgaagaaccatttgtgaaccggcgaccacttcacttctccttctgcaggagcttggctgaccggctgccgctctgtacggacataaggcgccagctccctaattgtcggccggctgaaaatatcttttacggcgatctgttttcctgcctgatgtaatcgggctgatacttgcagggctttgatggaatcgccgcccagttcaaaaaatgattgatccgcggcaatgttttcagttccgagcacttcgctccaaatcgcggaaagctctttttccatgtcgctttcaggctcggtaaatgcccgtccggtgtgcgcttttttccgcggctcaggaagcgcgcggcggtcaagcttcccgttcggtgtgacaggcagggcttcaagtgtttcaaagaacgccggcaccatataagcgggcatttcatttctgagcgcctgctgcacggtttcactttctgttccttcttctgtcacgatataagcgcatagttccgtttggcctgctgatgcgggcagagcggtgacggctgcttctttgacaccttttatgcctgttaaggcggattcaatttctttcagttccacccggtagcctctgattttgacttgctcgtccattcggccgatatattgcagcgtgccgtccggcagccattttgccatgtcgcccgtgcggtacatgcgccggttcttctggaacgggtcttggacaaaggctcgggccgtttgcttaggaagattgcggtaccctcttgcaaggccggaacccgaaatgcaaagttctcccgttacaccgatcggctgcggatgatctccgtttaaaatataaacgtgtgaatgctcaatcggacggccgatcgtgatgttctcactttgttctatatgtcttgccgctgtagtggcgacgctgttttccgtcgggccgtactcattggcaagctcagtgtgtggacaaactgataaactgcggctgataatgttttggtcgacggcttctccggctaatgtgacaattctgagagactctgcatcccccggctccagtacgtcaagcagtgtacggtacagtacgggaacaatgatcatgtgagtgatgcggtaagatgcaagatagtgtttaatagcaagaatatctcttgcttcatcttcggctaaaacggccgctttcgcaccggaaatcagcggtgtgaacatgcttgttacaaacccgtcaaatgaaaatgaaaagagctgaagaatcgtatctttctcattcagatcataaaatccgcttcgccattgaagggtttggctgacggatcgatgttcgaccataacccctttcggcctgcctgtcgttcccgatgtataaatgatgtaagccaaatcttccggtgctgataatgactggaccggcgaagcatcctgttcttggatatcctccagtgcgagcacttcaccgttaaaacgatcaggcacttgttctatcgcaccgtgtgcggtaaggagaagcgctgtgccgctgtctgagatgatatattgcttgcgttcctccggatattcaggatctatcgggacgtaggctcctccggctttccaaaccccgaagactgccgctacttgttccggcgatcttggtatcacaatgccgacggctgcatcaggtccgatctgccgtttttgcagagctctggcgattttattcgaccagtcatctaattctttgtatgtgatcaatgtttccccgctgataagggccgcggcatcaggtgtttttcgcgcctgggtgatgaacagttcatgaactgttttttcaggcagctgttgatccgtcatgccgttaaagtccgaaagaatccggttccgttccggagcagtcagcatgctgatcgcttgtaaagaagtttccggttcacggacaatgtgttcaagcatcgtcataaagtgggaagcccagcgctgcatcgtttctttccggaataaagacgccgcatattcaaacagaaaatgaatctgtcccccgccttcagaagcctgcagagtgacatcaaatttggaaaccggacgggacacgtccgcattctgaatatgcaaaccgtccaacagcagttcctcatgctctatattctggacgacaagcatggcgtcaaacagcggattgcggcttgtgtcccgctgcaccccgagccgttccaccagctcttcaaacgggtagtcctgatgctcatacgcttcaagcgccgcctggcggacttccgccaagtaatcggtgaaccgtttgtctcctttcggctccgttctgatggccagcgtgttgacgaacatgccgagaatcggttcaaggtctttgtgcggacgcccggcaatcggcgagccgacgatgatgtcttcctgcccgctcaatctcgcgagtaacgtattgtacgcggcgagaagcaccatatacaaagtggagccgtgatcccgggcgatgcggtgaaggccggatgccgtttcagcgtcaagcgtgcacgatacgctgccgcccgcaaagcttctgacagccggacggggcttgtcagccggaagctcaagcaccggaagctctccttcaagccgcttcagccaataggcttcctgcttctgatacccttctttctcctgaaatgaccgctgccagatggcatagtctttatattgaaggcgcatcggcgcaagcgaacggcctgcgtacagctcgccgaattctttaatcaaggtgttgacggacacaccgtcagaaataatatgatgcatatccgttaataaaagatgacgttcgtccgattctttcacgagggccgcacggaagagcggcgcttcctccagacaaaacggccggacgaatgcgtcagctgactcggcctcatccagctgaaacggcacgctgtcatggatgcgctgcaccggttcgccgtcaggccccgtttcaaaggacgttctaagcgactcgtgccgctccacaagctcccggaacgtctcctccagccggatgcggtcaagcgggcccgtcagttccagcacagccggcatattgtagccgacaccgccgtcttcaagctgctggagcacatacatccgtttctgcgccgaagacaccggataggtgtcctgttttttcgcaggctgaatcgcttcatacgggctctcttccaaatcctgaatgaccgaagcgagctcttccaccgtcggccgggcga

SEQ ID NO: 5 - DNA, 274758 bp, Bacillus methylotrophicus
ccttttccgtaagtgtattgctttccaacaggctgttcgaatcgatgtgtatcaccagccttataccatctaacccatgtctgaacctgtgtcttattcttaatattcaactcctgcaggatctctttcataggtacgcctgccaatctcatttctacagccttctgtttcacttcaaccggataactcactcttgtccccatagaaaaaacacctccaagtctaatttcggataacaatcatccgtattcaaacttgaaggtgtttttatttgtctcatcttatggggtcagtccccttaagctccggtttttcttatttataaaatactttctcaatgttgtatttcgactgaagggtattgatcgcgtacgtttcgtaaatctccctttccatcggatcatttacgacacatacttcaattttatacacttcgtccctgtgatgtttaacaggcgacacattgtcttcaaaatgctttttgattctttgtcttaatttacgggctttcccgacaaacagcagctcatcatgaatgttataaaacataaagatgccgcctttgtctctcggaatttggtgaaaatcaatgaaaccgtaaatcgctttaatcgccggttcattctccgacggtgactgctgccgttccgtaatggttacatcaggagcaggaaggtttatttttatcaaatgggtcacgtcctcttattcattaaagctccatcctatcataagaatgcgccaaaagctattttttattcaagcgccccggccggatcataaaggctcaaatcaatttccgtctgctgcccgagcgcgagtttcgccagttcagcccccagatacggcccgctcgtcagccctgaggcgcccagcccgttggcaacgaggagtccgctgatattcggcactttgccgatgacgggaagaaaaccgggagtaaacggcctgaaaccgactcttgtctctatcatagtactgtctgaaagccccggcgccacggttaatgctttgtcaaaaatctcgcggagaccgccggccgtcacccgcaaatccatgccggtatcgttttcatgagtcgcgcccgctatgattctgccgctgtcaaaggcgagaatgtattgatcgtttgggggcatgacgacgggccagccgcccgtctcctctccctgaagctctaaatgaacgatctgcgccttttggtatgatactgaaaaacggatgccgagcggctcaagcagctctctcgcccaagcgccggccgttacgagaacctggtcggcagtaagcgtgcgttctgcggttttcacaccgatgacggcaccgtcctctgtcaatattgacgcttcttcattgtaaacagccgctccgtgcttaacggccgcatttaacagcgccttacgaagcgccctcccgttcacccgggccgcgccgctgacatgaaccgccccgtattcctccgacagcgcgggaaacagcgccttcgtttcttccggagtcagccttgtaatgtcaccgatttcaggggcgtcctctcttcttttataagctctttcctccatttggctgagttttttttcatccgtatggaggctgacagcaccgaccttttgataaccggtttctgtttctccatcagcttcaagctgctgtatcaattggttataatagcgggctccgccttttgcgatcgcataccatgcctgattgcggcgctgcgacagccacgggcagacgatccccgccgcggcgtcagtcgcctgccccgggtgtttccgatcaatgaccgttacatccgcaccggcctttgcgagatgataagccgcggacgcaccgagaatgccggctccgataattatataagacttcatgtgtaacaccttttctatctgttttgtcttatttattttaacaaatggagcgcccggttcctaccggagtcctgacggcaatgatgagtttcgaaaacggaaacgtataataaaaggaatacgttcttgtctgaaagccgttttcctcaagagtcgctctgtattgtgatgtattttttatatctgacacggccaatgtgccgccaggcttcagcaccctcaccatttccacaatcgcccgttccctcttttttctgcctgaaatgttgtgtacggtaaaatgcgaaatgacaagatcaaacgtctcatcaggaaacggcatgtcttgcgccagtccgtcatacaaatcaatttccggcgctctttcagcctgtctgttcttttcaaatgcgtctcttccgtttccgaccaggtcccagcttgaccatttgtcaatcgctgagacgtcagcgcctttttgagccgcggcgatggctaatagcccccgccccgtaccgacatcaagcaccttcatgtccggctttaaaccggatagcgcaagaatgcgatggcggtgtaaaagtttaatggccgttgaatacaagagcatccaaagaccgagcaataaaaacaaggtgcccgtcagccagccccagtaaggaggaatcatgccgtataacgtgcctgcggcataaaggagcgcaataaagataaatccaaacgctccataaggcgcatcaattccgtatcgtgttgtcataacacccacccctttcaatatttatccaaatggtataccatattattctagcaaaagccgaaaggagatacgaccatatgaaacgcggcattacatttaacatcccaaatcaattcgggcggtttgcggcagatatattacaaccgttccccatctcttcctatacgtggtttatcggtgatggagaggcgtatacggaattcaaagaaggcatcgatacagacctgtttccgcaaaatcagcgcatcattcagggtcaagaactccgtcagcgtctggaaggaaacccttattatatgatttttgctgaattgaaagctttcccgggcgggatggtaacggaaatcaatacgtacgaggagtatttggagagttcctgtgagcttgtgcttctcattgcagattgctcgtatgtaacgttatattgcaaagatccggatatgctcgaagccctttatcagcaggctgtacaatgcggatttctccgcgttgactatgttacagatgagaatgacgcgagaacgggattgtctgtctgatgaaggtgcgtcctttttatgaagcgcctgatagggcttaggattcaaaatattgacaaattcgtgtgttttcaacaaaaaaacaaccccctcatgtatactgagtgcgtaacttacatatgaaaggggtatggcaatgaaaatcagcttgaagaaaaaagcaggtttttggaagaagacggcggtttcgtcacttattttcaccatgttttttaccctgatgatgagcggtacggtttttgcggccgggctgaataaggatcagaagcgccgggcggaacagctgaccagcatctttgaaaacggaaagacggaaatccaatacggatatattgaagcgttggatgacggaagaggttacacttgcgggcgggccggctttacgacggctaccggagatgcgctggaagtagtcgaagtatacacgaaagcggtgccgaataacaaattgaaaaagtatttgcctgaattgcggcgtcttgcgaaggacgaaagcgatgacatcagcaatctgaaaggattcgcttctgcctggcgctcacttggcaatgataaagccttccgcgctgcccaggataaggtaaatgacagcttgtattatcagccggcgatgaaacgttcagaaaatgccggactgaaaacggccttggcaaaagcagtgatgtacgatacggtgattcagcatggcgacggcgatgatccagactccttttatgccctgattaaacgcacgaacaaaaaaatgggcgggtcaccgaaagatggaattgacgagaagaaatggctcaataaattcttggatgtgcgctatgacgatctgatgaatccgtcagatgaggatactcaggatgaatggagagaatcggttgcccgtgtcgacgttttccgcgatattgtcaaagagaagaactacaatttaaacgggccgattcatgtccggtcaagcgaatacggtaatttcactatccaataaacaaaaaaccccgccaaatggcggggttttactattaaccgatggagccttccatttcgaacttgatcaaacggttcatttcaactgcgtattccatcggaagttcttttgtgaacggctcgatgaagcccataacgatcatttctgttgcttcttcttcagaaataccgcggctcatcaagtagaaaagctgttcttcagaaacttttgatactttcgcttcgtgctccaatgaaatgttgtcgttcaggatttcattgtaagggattgtatcagaagttgatttgttatccataatgagcgtatcacactcgatgtttgaacgggcgccgtccgcttttcgtccgaagtggacgataccgcggtatgttacttttccgccctgtttggaaatcgattttgatacgattgtggatgacgtattcggtgcaaggtgaatcattttcgcgcctgcgtcctgatgctgtcctttacccgcaagagcgatagaaagcgtcatgccgcgcgcgccttcacctttcagaatgacagccggatatttcatcgtcaatttagaaccgatatttccgtcaacccattccatcgtcgcgttttcttcacaaaccgtacgtttcgttactaagttgtaaacgttgttcgcccagttttgaattgttgtataacggcagtagccgccttttttgacgatgatttcaacaaccgcgctgtgaagcgagtttgttgtgtacacaggagccgtacagccctctacgtaatgaacgcttgcttcttcgtcaacgatgatcagcgtacgttcgaactgacccatattttcagagttgatgcggaagtaagcttgaagcggtgtttcaaccttcacgcctttaggcacgtagatgaaagatccgccggaccaaacagctgagttcagcgccgcaaacttgttatcagtcggcggaatgactttcgcccagtgctcgcggaaaatgtcttcattttctttcagcgcgctgtctgtgtctttgaagacgatgccttgctcttcaagatcttctttcatattgtggtaaacaacttcggattcgtactgtgcagaaacaccggcaaggtatttttgctcagcttcaggaataccgagtttgtcgaatgtctgtttaatttcctcaggcacttcatcccaagaacgctctgaacgctcagacggttttacgtaatacgtaatttcgtcaaagtttaaagagtttaaatccccgccccactgcggcatcggcatgttgtagaaatgctcaagagatttcaggcggaaatcaagcatccattgaggctcttctttcatgcgtgaaatttcttctacgatttcttttgtcaatccgcgctctgaacggaaaatggaaacgtccttatcgtgaaaaccgtacttgtattcaccaatttcaggcatttttttagccatccattttcactccaatcttttaattgccgcctttttcgccagcgactcctttttcaagtgctttccatgaaagggtggcacatttaatccgggccgggaatttcgaaacgccttgaagagcttcaatatccccgagatctatcgagtcgtcatactctttcccttgcatcatgtctgagaaaaccttagacatggaaagggcggtatcaatatcttttcctttaatcgcctgcgtcatcatggaagccgaagccatggagatagaacatccttccccttcaaacttcgcttcctgaacggtatcgccgtcaagcttcattgtcagtctgatccggtcgccgcaagtcgggttgttcatatcgacgacgatgctgtcatccaaaacccctttgttgcgcggatttttgtaatgatccatgatcacttgtctgtataatgtatctaaatttgcattaaaagacatttgtaaagtactcctttgtcttttggagggcttccgcgagcttatcgatctcttcctctgtattatacagataaaaactcgctctcgcagtagcagatacatccagccatttcatgagcggctgggcgcaatgatggccggctctgaccgcaatgccctcagcatcgaggacagtcgcgacatcatgagggtgaacctcatcaagattaaatgtcacaagtcccgcccgctctttcggaccgtataccgtcacgccgtctagctgctcgaaacggtcaagcgcataggctgcaagcttatgctcatgccgggaaatctcgtcgagtccgatctcttcaagaaaatcaatcgcagctcccaatccgatcgcgcctgcgataatcggcgtgcctgcttcaaatttccacggaagctctttccaagttgattcataaagccctacaaagtcgatcatttcgccgccaaattcggccggctccatattctcaagcagttctttcttgccgtacagcacgccgattcccgtcgggccgcacattttatgggaagaaagcgcgaagaagtcgcaatccaagtcctgaacgtcgattttcatgtgcggtgtgctttgcgccccgtccaccacgatgaccgcgccattgtcatgagcgattttggcgatctctttaatcgggttgatcgtgcccagcacgtttgacacatgagcgactgccacgatcttcgtatggcttgtgacagtctgccggacgtcatctaacgaaagcgtgccgtcttcctgcatcgggatatactttaaagtcgcgccggttgcttttacagcctgctgccacggaatgatattcgcatgatgctccatttgggtgatgaccacttcatcaccgggttttaagctggcgcgggcatagcttagcgccaccatattcagtgaagttgtcgtgccttttgtgaaaatgacctcagccattgatttcgcattgataaacttacggactttttcacgcgcaccttcatagccgtctgtcgctctcgtgccaagagtatgaacgcctctgtggacattggaattgtatttgctgtaatactgatccactgcttcaatgacagcacgcggcttctgggaagtcgccgcgctgtcaaggtacacgaggtcatgtccgttcacttgctgatgaaggatcgggaactgttcacgaatatcggtgatattcattattttactttcctttcgatgacggagacgagctgtttcttaactccttcaatcggaagctcttttaccaccggagcaaggaatccgtaaatgactaagcgctccgcttcttctttcggaattccgcggctcattaagtagtaaagctggatcgggtccacacggccgacagatgccgcatgtcctgcagttacatcgtcttcatcaattaaaagaatcgggtttgcatctccgcgtgctttttcactcagcatcagaacgcgggattcctgttcagcgtttgctttagacgcgccgtgctcgattttgccgattccgttaaagatggaagatgcggcatctttcatgactccgtgcttcaggatatagccttcagaagccttaccgaagtggatgatctgcgtcgtaaagttttccgtctgttctcctcttccgacaactacggttttcgtatcgccgtatgtgccgtctccgtagaggtttgtcgtattttcagaaatcgtgtcgccgtcgttcatcagtccgagcgcccactcgattctgctgtcgcgtccgagcgcggctccgcggcggttgacgtatgttgtgacacctgctgacaggttgtcaacggcaccgtacgtcacgctggcattatcacctgtgaccacttcactgataatgttgaatacagcttctttcgggttcaccgtgctgatgtagttctcaacgtaagtgacggagctgtggtcttcagcgacgatcagcacgtggttgaacaatgccgtgtcattgctttcatgaacgtaaacggcctgaacaggcgtctccacctgaacgtttttaggaacataaaggaatgccccgccgttcattaatgctgcatgaagcgcagtcagtttatgttcgtcgaccttaacgccgtctttcatgaaatacttctcaacgaggtcgctgtgctcacgggcagccgttaagatgtccgtaaagatgacgcctttgtctttcagttctttggaaagagaaaggaaagcaggcgtttggtcacgctgcacatataacgttttgtcttcgttttcgatatcgatcagcgcttttgcttcatcagctaaatcttctaaagaagcaagcggcgcgttttctactgtatgcttgttgaactttgtaaagttccaatttgtgatttttgttttatcaggcttaggcagcggcagatcgtcagctttttcaagagcctgtaagcgcaggtttttcagccaggcaggttcttgatgcttttcggaaaagcctttgacatattcctgatctacggatagtttcgtttccaatgtcatgattatccccctaacgcttacgcttcttggcctacagtttcgtcttcaatgcctagttcttgtttaatccagtcataaccttccgcttcaaggcgctgtgcaagctccgcgccgccggatttcactacgcgtccctgcatcataacgtgaacgacatcaggcgtgatgtagttcagaaggcgctgatagtgagtgatcattaagcagccgaagttttcgctgcgcattttgttgattcctttagaaacgactttaagcgcatcgatatcaagacctgaatcgatctcgtcaagaatggcgattttcggctcgatcatcataagctgaaggatttcgttgcgttttttctcaccgcctgagaaaccttcgttcaggtaacgctgcgccatttcagggtccatttcaaggaactccatgttttcgtccattttgcggatgaatttcataagagaaatttcatcgccttcttcacggcgtgcgttaatcgcagagcgaaggaaatcggcatttgtcacaccgctgatttcgcttggatactgcatcgcaaggaaaagacccgcctgagcgcgctcgtccacttccatttccagtacatccttgccgtcaagcgtgatgctgccttttgtaacttcgtatttcgggtgtcccataatcgctgctgaaagcgtggatttaccggtaccgttcggccccatgacagcgtggaattcgccgccttttatttcaaggtttacaccttttaagatctcttttccttcgatttcaacgtgaagatccttgatcgttaatgttgaagcagccatatctatacctccaaaatatataatcattattctcaatttattctcattctaattttataacaaatgaaaagtaaatacaactttttatattacccggaacattcctaaagtttatcaaagatcaaggcgtaattaaagctgtttgaaacagaaaaagggcggaaatccacccttttttactgaccgattttctcattaagctgcgctgcgaggaacttgcttttttgatattcaagctccctctgccgttcgacttccatcctttttgaaagacgccgtccgtattcctcgtagccgatgccgtgtgacttctgcatcgctttttccatttcaggcgtatagtcaaggtccagtctctcgtggctggtgcagataatgaatcaatcccttcatatatttgtttctattgtaacaatgatcccctgctccggccaaagagagtgtgcccctgaatcctttcgaatgtgccggaaaccggcgctcactttatctgaaaaacggtattcacacgattgctcattctaatgcgtcgtatgtccgaattcctgaatgcactgctgcacgagggtcactccctgactgagagccgcgccgccctcgaatgccgccgcgacgctgatgacctcaaggatgttttcttctgtggccccttggtcaaggcagcccttcgtatgataaatcatgcaaaattcatcttgagcgctgatgctgatacccagagcgattaattgtttctctttttcagttaatgaatccgctgagaaacactgttcagtaaattcattaaacttccgccccatcatcggcattttttgttcaaatatgcctaaaccttctttgtattgttttaacgcgtcatgcacgcttttgccgttatcctggtattgagccactgccattccctccaataagttaaccttcccttttattatggacagttctccgattaatacccgaaaaaaaccccggatgactcatccggggttttcgctttattcagatacgggaagcacggctccgtcgtattttttctcaatgaagtctttgattttcttagagtgaagcacttccataagcgctttgattttctctgatttttcgtcacctttgcgtacggcgatgatgtttgcgtacgggttgtttttcgttgattccacttcaatcgcgtcttttaacggattcagtttgttttgaatcgcatagttgacgttaatgaagactgcatcgccttcttcttcattatatgctttcgccgttaattcaggggcgatttttttgaatgtcaggtttttcgggtttttcgtaatgtttttcgtagtcgcttcaatcgttttcaccttcggatcaagtgtgatcagtccggctttttcaagcatcgccagcatacggccttgttcagcgacattgttagtcatgatgatggtcgcgcctttaggcaggtctttcagtgatttgtattttttcgtgtaaattccgaatggctcaaggtgaacggctccggcattcacgagtttgtaatctttattttccttcatttcctgttcaaggtaaggaacgtgctggaagtagttcgcatccacttcattatcagctaacgctttgttgtacattttgtaatcgttcagcacttttacttttaatgtgtagcctttttccttcaagagcggttccgcttcttttaagatttcagcatgcggtgtttttgtcgcggcgacgacgatttcctttttattcgagccgtttgatccgcaggcggccaaaactcccgcgaacacaagcagcagcgcacttaatacaatctttttcaatgtaaatcctcccttatcttttgtctattatatttgtaattacatcaccgataatctgaatgataaagacgatgatgagtataaatactgtcgctacaaacgttacatccgtattattggactggtagccttctacatatgcaaggtttcctagtccgcctgaaccgatggcgccggcaatggcggtagatccgatcagggcgatggccgtaacggtgatgcctgaaattaacgcaggcattgattcaggaatcagcactttgaagataatcgtcgatgtctttgctcccattgatctggcagcttcgatgactcctttatcgacttcccggagcgcaatttccgcaagacgggcgtaaaacggcgcggagccgataatcagcgccggcaatgcggcgttcggtcctaaaatcgatccgaccaaaatcttagtaaagccgagaagcagaataattaaaataagaaacggaatagacctgaaaatattaacgaccgccgcaatcacggtgttaatgattttattttcccataagcttcccttgcccgttaaaaagagcagaagaccgagaaccgctccgatgataaatgaaaaaactaaagcgatgaccgtcatataaagggtctcgtatgtggccgtccacagctcggttatatcaacgttcgggaaccatttttcaaacatttgtgatcacctctgcttctacctgtttgtctttgatgaaccggatcacgttttctacttctttttcctgaccgtcaatatgaatgaataaagaaccgtaggctccgtccttcgtctgtgaaattttcccctgcagaatattgacgtccacatcaaagtttcggatcatttccgtaatgaggggctgctcggctgcctgcccgacaaatgaaagctgaatcgtttttcctgtcgctgtttcctgcagaaaatgctggatggtttctttcgtctcctctggttctgtcacctgctgaacgaaacgcttggtcatcggttcgcgcgggtttctgaaaacttggagtacttcgccttcttcaacgactttcccgttttccatgactgcgactctgttgcagatttttcggatgacgtgcatttcatgggtaatgagcacgatcgtcaggccgagtctgtcatttatatcggataaaagatccaaaattgaatcggtcgtctgcggatcgagcgctgatgtcgcttcatcgcacagaaggactttcggattattggcgagcgcccgggcgatgccgacacgctgcttttgaccgccgctcagctgcgacggataagatttttctttcccctctaatccgaccagtttaatcaattcatcagcgcggcggacccgttcgctttttttcacgccggcgatttccagcggaaacataatgttctcccggacggtgcgcgaccacagaaggttaaaatgctggaagatcatgctgatttcctggcgcgcttttctcagcccgcggctgcttactttatttaattccgtccccgcgacttccacggttcccgacgtcggcttttcaaggccgttcaggagacggattaaggaacttttaccagctccgctatatcctataattccaaatatttcgccctttttgatatcaagagtgacatcttggacagcattgacatccccatgcttcgctttgtaaatttttgaaacattttgaagatggatcaaagcaatcacccgccttacactattctaagaaatcttccgggtttctccgcaaaagaaaagcctttctgcaaaaatgagcagaaaggcttattgaaaaaggcctttctctcatctttcaaagcagaccgcttcgagtgaattggcaccatttcaacattgttgatggttgccgggcttcatagggcacttccctccacctctcttgataagagaaaacatatcgtattttcgtccggaaattcttactgtagaatagcacggcgaatgataaaaagtcaataaaataaatattggaagctattgtcacatagtagattgagttacggccgtttactgatcgcctgaaaaaatccgtttgtcagccagaggatggcctccagcttcagcagagctctgaatgatcctttcactttgagttttccgctttggataagcttttgcaaagagacatcaccatgcaggagatgaatgatttccgtctggtttccgtaaaaggtcaaattagatttttcctttgaaaccgacgtttttctcatttctccctgtccgttaattgagaccgttaaggcttctgtttctccttggaatgtaatcagaagcgttgaggcgtttaatagcggtttcaaaaacagatgctgtccgtcattctctgaaacttctattttctccactcgtataacctcccgttttaatggccatacatacactttctctttttaacggacagaaccctttataaaccgcacgacattttcctgtaaatattgtcacatcgggaacgtttgcgatgttttttgtttaatcagctcatataaataggaaacggagcggaaggcgtatcctttctcaacaagctctccgcctttaaacagcaaaaagcacggaacgctttcaatctgataggctttggcgaatgcgggggaataattcacgttgtttttatagaaggcggcgccgggcagcatttcttcgacgacagtaagcattttggacgccagctggcatgtgccgcaaaacggggtgtacaaatacaggagataaacgtcatcctgaatcgattcgagttcattttcttggagttctttcatgattaccacctcaggtcgttctttttcaaaaatacagtgtcagcatcaaagccggctctgatcagcacagatgcgagatgatggcccgggcacgactcgacttgcctgtatgttctgtctatataaatatggcgcgcgtcgggaagctcccgtttcagctgttttcttaatttttctccggagtcatctgcgtccgttaaaatatagacgtctctgtcaaacaggcggtccgccaaatcttccagttcggtttggccgatcgtcccgtttgtacagacgatttccgcgggttcgatgagcacttccctgactttgattttatcagattttccttctacgataatgaccttttcatctccgttgtacataagcgcgtcacctgccgattgttttagcgtcagattgaaaaagaaggcagtgaaattcaccgccaactgttaacaccagccattctcataatcgcaatcgacatatttcggatcgctgccgtttatgacatcggctgttttataaaatttttgattttcaaatgaaaagccctgtttgagctcgtactggtccatgcctgtcatctcgccgatggcttcattttcatgaaacaaggaaaaccggccgttttgaaagcggcccgtaacgttctccgtcacatcgaccttttgtttatcaaaagccattttagacacctcccgttacagatagaatgtccaaatggcccctttgctatccgatcagtcttcttgtgtcatttcgtcatattgctcggaagtcatgaggttttcgatttcttcagcatcagccggttccacgacgatcatccacgctttttcatacggagactcgtttacgaattcaggactgtcatcaaggtcttcgttcacttccgtcaccgttccgttaatcggtgcgtacagttcggaaacggttttgacggattccacgctgccgaatggctcgtccgctttaatttcggcgccgacttccggaagctcgacaaagacgatgtcgccaagttcggcttgcgcgaaatgtgtaatcccgatgcgggcttttccgtcctcaactttgacccattcgtgctctttggaataacgcatatctttcggtgtgctcatctaaatccctccatttttttcttataataagaagataccataattctttgaacctggcattacatccaatatttttcgaattggtcttctttaaagccgacagtgactttttcgccgtctgtcgtaatcgggcgtttcaggagcataccgtctgatgccagaagttcgagctgttcatcctctgacatatggtacagtttttcctttaagttcagctcgcggtatttcattccgctcgtgttgaaaaactttttcagctcaagaccgctcttttcatagaggtctttaatttcttctttcgacggagtttcctccgcgatatgtatttcgtttatttccttaccgcggttttccagccattttttcgcattacggcacgttccgcatttagggtaccagtaaaaatttaacgacatcttcttcaccccttgtaaatgatcgtcgttattttaacacaatcacttgtaaaaacctataacgttgcttcatgaaaaagcgcccctgatgaaggagcgctttcagcatgtgatcagactgtatatttttcttcacggaagacggcggctgccgcttcacgttttttctgaatgaggtttttcggcgtcaggcgcgtcagtttgcgcagcacggaaagcatcatgcggagggaatctccttcctccatggcgatcagtgattctttagcgtgcgcttcaatgttctgaagggcttcctgggcaaagatttccgtatataacagcttctgcgcggctttttcggcaccgtccgccgcaatcgctttttccgttctgaggacggctgattccaaagcgtacagcgcgctgacgatatcggcaatgttcaccatgatttcctgctcgccttcgatctcttttccgtatttctgcgccgcgagacccgctgtcaagagggcgatctttttcgcctgtctgacaatgtatttttcctgtccaagaggctccgagcccggctcttcaggcatcagcatcatgagttcttcttggagcgcttttgctttttcaaagagcggcagctgaccttttacggcttttttcaggaacgtgctcgttacgatcaggcggttgatttcatttgtgccttcaaaaattctgttgattcttgagtcgcgataggcgcgctccacttcatattcctgcataaatccgtaaccgccgtgaatttgaacgccttcgtcggcaatataatcaagcgtttcagaaccgcacattttgttgagcgagcattcaatcgcgtactcggcgattgacttcgcgacttcgcgtccgtctttttgctccgcttccgtcagtctgctcatattatcttcgaataagcccactgttctgtatacagagctctccatcgcgtaaagccgagctgacatcgtcgcaagcttttcctgagtgagcgtgaagcttgagatcggcgttttaaattgccggcgctggtttgcataagcggcagacagctcaatcacccgttttgaagcgccgattgtgccgacggcaagcttgtagcgcccgatattcaggatattaaaagcgatgacatggccttttccgatttcgccgagaaggttttcttttgggacttccgcctgatctaaaatcagcgttcttgtcgatgaacccttaatccccatttttttctcttccggtcccgttgacacgcccggatagttcttttctacgataaatgcagaaaacttatctccgtccactttagcgtagacgacaaagacatctgcaaaggcggagtttgtaatccattgcttttctccgttaagaatatagtgtgtgcccgcttcattcaaaacagccgtggttttcgcgccgagggcatctgaacctgaaccgggctcagttaaggcgtatgccgcgattctttgtcctgaagccaagtccggcaaataggtttttttctgttcttccgttccgaagaacacgatcggcaatgagccgatcccgacgtgggcgccgtaagacagcgaaaagctgccggcacgtgaaaacttttccgtaatgaaggctgaactgattttatccaggccgattccgccgtactcttcaggcacgtctgctccgaggaggccgagatctccggcttttttcagcagtctgaccgaatgctcgaactgatggttttcaatttcatcgatataaggaagcacatcgtttacgacatagtcttctgtcgttttgccgatcattttgtgttcgtctgtaaagtcctccggagtgaatatttgatcatatcccgtctcttcaatcagaaagctgccgccttttttgacgttgaccgtttcctgtttcatgttcgtttccccctttttttaaatgagttcaaatacgccggcagctcccatgccgcctccgatgcacatcgtcaccacgccgaattgctcgtttctccgtttcatttcatgaatgagtgacagggtcagcttcgttcccgtgcatccgagcggatgtccgagcgcgatggcgcctccgttgacgttcaccttttcttcatctatcccaagcgatctgatgacttgaatggcctgtgaagcaaaggcctcattcaattcaaaaagcccgatatcctgcaattcgagtccggcaagcttgagcgcccgcgggatggcttcaatcggaccgatccccattacctcaggcggaacgccgcctacggcaaaggaacggaatttgacaagcggcgccaatccgagcgacgaagctttttcgcgatccatcagcatgacagccgccgcgccgtcacttgtttgtgaagagttcccggccgtcacggttcccgttttagaaaaagccggacggagcttcgccaagacgtcagccgatgtgccgggacgaacgccttcatcttgagaaaaggtaaattgttttttccgcggcttatggtcatcaccgacttctgtcagcgatacttcaaccggcacgatttcgtcattgaatttcccttctttaagagcttttgcggcattctgatggctgcggacggcaaatgcatcctggtcttctctggatacgccgtacgtttcggctacctgctccgctgtgtgccccatgctcatgtaatactcaggcgcatgctccgccaaagcgatattcgggcgggtcacatgccccatcatcggaacttgcgacatggattccgcaccgcccgcaatgacggtgtcacccgcgccgatcatgattttttcagcaccgtaagcgatggattggagcccggaagagcagtagcggttcaccgtaatggccggcaccgtatgaggaagccccgccagcgcaccgatattccgcgccatatttaatccttgttcggcttcaggtgttgcacatccgataattaagtcatcgatatttccttcatatccgcctgcccgtttcagcgtttcttttacacaaagcgcgcctaaatcatcaggacgaacggctgcaagcgatccctttttcgctttaccgaccggggttctcgcaccggccacaatgactgcttctctcataaacaccctcctagttccgtaaaggtttgcctttgacgagcatatgctgcattctcgcttgagatttcgcctcgccagcgaggcttaaaaaggcttctctttcaatctcgagtaaatattcttctgaaacctccgtgccgaacgggactcttccgccggcaatgacatgggccagcttcttcgcaatcttcatatcgtgatcggataaataacccgaccgtctcatttggtctgctccgagcagtaatgccgcacatccggtttccccggtgactttcacttttttgcgggcaggcgggcggtatccgctgtcatataaggaagcagccagctgtttcgcatcgtgcagcaggtgatcctgattcatgctgacacggtcagccgcggacaaaatctgcatatcacgggcttcgtgtgccgaaccggacactttggcaagcgcgattgtttcgaaggttttaatcgctgcgtccatcagttcacttccgccgtccaaataattcatgtacagctctttgtttcctccgccgcccggaataagaccgacgccggtttcaacgagacccatatacgattcgctcgccgcctgaacgcgtgccgccgggagacagacttccgtgccgccgccgagtgtcatcccaaatggcgccgcgacaacgggtttagcgctgtatttgatgttcagcatcgtctgctgaaaacggcggatgacaaaatcgacttccatgaagttatcatcctgagcttccatcaaaatcatcgcaaggtttgcccccgcgcagaaatgtctgccttggttaccgatgacaagacctttataattccgctccgtttcctcaagcgcattgtcaatcatctgaataatgtctaagccgatcgcgttgcttttcgtatgaaattccagcagcgcgacatcatcgccgagatcaatcagacttgcgccgctgtttttactgataacgccttttgtttcttttaacgtttgcaggctgatccgtttcggattttctttcacagccctgtattggccgtctgaatagtaaaatggtgttccgttttccttcatataaaatgtttcatggccctgatcaagcatttctttcacccagccggggagtgctgcgccttcttcttcgagccgctccgctgattttctgacgccgatggcatcccacatctcaaacgggccgagctcccatccgaagccccatttcatggcgtcgtcaatcgctttgatatcatcagcgatctcacctaaaagccgggctgagtataagagtgtttgcgatgtaatattccaaagcaggcgtccggcgcggtcaccagagtatataagcgctttcattttgcctttggcaccctttgcctgtttggcggcttctaaagcgggtgtcttcattttcgagcgctcaccgtatgtcatggtcagcggatcgagttcatatattgttttaccttcttttttgtaaaaaccttggcctgatttgctgcccagccaattgtttttcagcatgtcattcataaattcaggaagcttaaacatgtctttttcagcgccgtcggctttatcatacacattttttgccacatgggcgaaagtatcaagccccacaacgtcaagggttctgaaggtcgcgcttttcggtctgccgatcaaaggcccggtcaccgtgtccacctcgccgatgcggcagccggaagaaagcatttctcttaccgtgaccagcaggccgtacgtaccgatgcggttggcgataaagttaggcgtgtcttttgcgatgacgacccctttcccaagcgtgttttctgcaaatgaagtcataaactccagcacgtcaggatctgtttcctgaatcggaatgatttccagaagctttaagtagcgggccggattaaagaaatgggttcctaagaaatgagctttaaaatcggcagatcggccttccgccatttttgtgacggagataccggacgtattgctcgacacgatgcttcccggtttccggtattcatcaacgagtgagaaaatctgtttttttacgtcaagattttcgacgacgacttcaataatccaatcagcatccttcaattgagctgcgtcatcttccaaattccccgccgttatatagtcgagattggcagccgaagtcagcggcgccggtttttgcttcagcagcttttgcatggccgatcggctcagtctgctgcggacctccgggctttctaatgtcagcccttttttcatctcatcctttgtcagctcgtttggcacaatatcaagcagcaggacgggaattccgatgttagccaagtgcgcggcaattccggaccccataacgcctgatccgagaacggctgctttctttataaacttgtgcatgagtcatcccccttgaactttgaatgaatagtcattcattttttcggcaaaaaaaatgaaacccttttcttctttcatcttaaaagattttcaggatgacttcaatagcaaatatggaatttttttaaatttttctgcttccgcatgttccatggcgcgggcgggaaacttaaacccggaggtgaagggaatggtgcgagggagaaaagatccgtcttctgccgcagtgagcgcggccagcatgaaaggaaatgcgggaccgaaacaaaaatacggcggcggcaaacggacgagccaaaatcagcaatataaaaaagacaacatggaataacatgctgcggctgctttttggagcagccgttattttttgaagatccctttcagcacaaatgccgcatttgccgggcgctcggcaattcttctcatcaggtacccgtaccaatcggttccgtacgggatatacaccctcatcctgtatccttcttcggcaagctccttctggcgctccgttctgatgccgtacagcatttggaattcaaactgctcccggggaatctgatgttcgctgatgagtgttttcgtaaaagaaatgatgtcatcatcatgtgtcgccaccgccgtttcatggccgctcaaaagctgcagcttaatcagctgctgaaaatgaagatcggttgcttttttatcagggaatgcaacggccgccgattctttataagcgccttttacaagcctgagcctcggcttgtatggcatcagaccgctgatgtcttcagctgcgcggtacaaataagcctgaatgacggtgccgagcatcgggaaatccggcttgcaccgcttatacagctcaagtgtacggccgcatcttgaatagtcctccatatcaatcgttacaggcacgcagcgttcttttgcctccgtcaatatgtctctgacatgctgttccgcgagcttctcggaaatatccagaccgatggatgttaatttcagcgacagctcacaatccagttgattctcggcaatcgccctgattgcttttttacattcttccgccgtccttgtcgcatccttctctgaacccgcatattcacctagataatcaatcgaagccgacagccctttttggttcagccgctttaccgttttaacagcttccgtgagtgtttcccctgcaacgaaccttcccgcaccgaagcggattccgtaagcctgggcgaattttgtaagcattttatttttcgacaaaaataaacatatgctccgcagcaaggatgaactccctcctttttcttttattcgtgtatgaaatcccgatcgcagagaaagctaaaaagaacagaattgaaggaggcgtttatatgaacaaccaagagcagcacggaaacttgccgcctgccgtcatctcaacgaaagaccatttgtatcttgaggacatgctgaactggaatctgcttgccatgaaaaaagcgcattttatggcggaacactgccagaatcagacgttaaaacaagagcttgatcagatcggccggatgcatcagaagcattatcagcacatattaggccgcttgaaccccgatcaaggcggacagacaacaacaggctatatgcaataggaggacaatacatggaacagcaaaaccaaaaaatcacgaatccgcaaacgcccgtgcccaatacggcgcaaatgaatgacagagacttggtgaatgagctgctgacgacggaaaaatacatcacggcttcatattgcacagccctgcacgagttcagccacgagtctctttatcaagatattcaggcgattttcgatgagtcacaaaaagcgcaaagaagattatacgatgtgatgtttcaaaatggctggtattccattgaagcagccgatacccaaaagcttcagcaatcgtatcagaagttccggcagaccattcagcagcagtctccctaccagcagtaaaacgaagaagggtttgatgttttcgacaagcatcaatcctttttttatttttgcacaaaaagattgacttgtcattaatccttatttatatttaactaatgttaattattttctcgaggaacaagatgaggaggagttatgaaaaacgcggatcaatatgtgtctgacatccagaaatctcttcagacgctgctgcaaaacatacagcctgaaatggtggaaagcatggcaaaacacgaggtgacgcctgcccaattatttgttttagccagcctgaaaaaacacgggagctgcaaagtttccgaaattgcggaacgcatggaggtaaagccgagcgcagtgacgctgatggccgaccgcctcgaacaaaaaggacttatcgtccgcaaacataaccagcaggacagacgcgtcatcgacatcagcctcaccaaaaaaggcgaaacaaaattcgaagatgttgtggaaggacggaaagcgatactggcgcgaaacctatccgttctgactgacgatgaactgattcagtccgtgaacatcatccgcaaagtagcggaagccgccgagaaatacgcggctgatcaaaaagaaaacgaatagaaaagaggagctgccgaaacatgagcattgaaaagaaagatccaaaacgcacattattaataaccggcttaattatcgccatgtttttctcagcccttgacggcaccatcgtaggaacggcgattcctaaaatcgtgggtgacctcgggggattaagcatgatgacgtggctgaccacggcatatcttttaacttcgacgacgatcgttccgattgcggggaaacttgcagatttattggggcgccgcgtcgtctatgtatcaggtttattgatttttatgggagcttccgcactgtgcggaatggccagcaacatgacggaactgattattttccgcggacttcagggaatcggcggcggtgtcatgatgccgatggctatgatcgtcatcggggatttgttcacagggaaacagcgtgccaagttccaagggcttttcggagcgatttacgggcttgcttccgtgatcggcccgcaaatcgggggctggattgttgactcattaaattggaaatgggttttctacatcaacctgcctgtcggaattttagccgtgatctttatcgcaagaggacttcaaggcagaaaacagaccgggccgattaactttgacatcgccggcattttcacaatgatcgtcggaatcgtcagcctcctcctcgcgctcagcttcggaggaaaggattacgcatggggctcttggcagattctcggtctctttgcgcttgcacttgccgggattgtcggattcattttcgctgaaatcaaagcaaaagaaccgattctgccgatgtacctgtttaaaaacagaacgtttaccgtactgaatctgatcggctttttcatgagtatcggcatgttcggcgccgttacgttcgttcctttctttatgcagggaattatcggagtcagcgccaccgcgtccggcacgattatgacgccgatgatggtatctatgattatcacaagtattatcggaggccagttggtttataagatcggtattaaaccgcaaatcatgatcggcatgctgatcatggccgtcggcttcttcttattaacgactttgcagctggatacaagcaagctcgcggctacatgctatatggccgtgatcggtctgggaatggggctcgtcatgccgcttctcacactcgctctgcaagaaacgttttcaaaagaagagctgggtgttgtgacctcttcaagccaatttttccggatgatcgggggaacgttcggcattacggtgctcggcgctgtcatgaatgccagatcaggaagccttttaaccgacagactggtgccttacttagactcactcccgaaacaggcaagtgcctttgccgcccagtttaaaggtatgattgacaagaatcctgaagggctgcttcaatccttgttcagccaggaatcgattaagcagattccggccgcattttcttcccatatcgtgccggttttgaaaacgtcactgatggattcgcttcacagcgtgtttttcacaggcctggcctttatcgctgccggattgatcctcacgctgtttgttaaatcaattaaactgacaaacaaaaagacaggcaaacaagaagaaaaggcgaaagccgtttaacaaagaaaaatcccgcggatgccgcgggatttttttatatcatctgggaatgaccagtcttccgcctcattggaaatggggggtgaaaattcaaaaaaatagtgatggaattctttaataaaccttaaacatttcatagttatctttatagtacgacataataaagtcacgaaaatttcttaccgaagaagataatagcttatgtctcatccaagataagccgactggatatgaagcagagtgatcagtcacttttataaaattcagccccaatgttctgcaaactgaaataggaagcaacgccacaccttgatccagctttataatctcgaccagtaaatgagaatctgcctcaaatgcaatatttggggtgaaaccagctttctcacaaagcgaggctgtaaaaccgctatactcttcattattagcaagggtaataaatggttcatcggcgacaagacgtaaagaaatttcagttttacccgtaaatcggtggtttgagggcaaagccagaacgatatcttcatttaccagcacacaactctctatctcttcatcttgaatcggatgacctgttattcctaaatcaatgtcccctttttttaaacttgttatgatctcgcttttaactccgattgcttggagaatttttgattgaggagagcggttgatatattcactcatcagtcctgcaaggaatcttggattggaaatagatattctgatggtgccagaaatttgatgttcctccaattgaatttccgtttgtgcattttcaatctcagtaaaaatcctgtttacatgttttaaaagaattttccctgctgaactcagcttaatatttctgccttttctctcaaacaaggttgttcccagttcattctcaagtctttttatagtgaggcttaaagaaggctgggcaatctttaattgttctgctgctttagaaatatgttcagtataggcaactgtctgaaagtattttagctgcagcaattccatctgtctgcacccccctcatttatttcaataaatatatatataccttattatgtattggattaaatgtaaatgcgaatgtaagataatagcatagttaaagaaaaggaaagggtgtcattcaatgaaaattgatgtgaaagatatagcaaaaaatttaagtacgccactaacagcccctgcttatcctatcccaaattataaatttgttaaccgtgaatatttaaatattatttaccgaacggatgaaaaagctttacgtgcggcagtgccggaacctcttcaaattactgaacctttagtgaaattcgaagtcatgtggatgcccgatgtttccggacttggtgcctatacagaggcaggacaagtcatccctgtcagctttaatggtgaagaaggagattatgtacattctatgtatgttgacaatttcccggctattgcaagcggacgggaacttactgcatatccaaagaaattgggtgcccctaagctgtatatagactctgatactcttgttggcacattggattatggcagtcttcgtgtggcaactgcgactatgggatataaacatttcgaaatggataaggaaaaagcgaaaagggaaatttgccgacctaattttatggttaagattgccactgattacaatggtgatttaagggtttgtgatttggtgcggacgcaaataacgaatatagaagttaaaggtgcctggactggaccggcgcggcttcaattatttgaacatgctctggcacctcttgcagatttgcctgtattagaagtcgtttcagcatctcatattattacggatttaaccttaaatgcagcacagccggtttataactacttagaggaaaaataaggagcgttgacaatgagaattgcagttttaggagcaggttctttaggaaccattgttggagcatatctgtctgctggcggaatggatgtcgaattgattgattcatacaaagaacatgtagataccttaaatcaaataggtgctaaagtagttggtacaacggaatttcaagcaaaggtgaaagccattacccctgaaaacaagtcaggcaagtatgatttcatattacttctgacgaaacaattatataatgactccattcttaaagagttgctgccttttttaaaggatgacagtgtagtatgttccttgcaaaacggtatacctgaacagaaagttgcttcgatcgttggtgatgaacgtgttattgcaggttctgttgaatttggtgctacgtttattgagccgggcgtatccagacttacaactgagtatactcaatttaaagagtacgcttttcaaattggagaattacatggtgaaacaacagaaagaatccagcgtattaaatcggttttagaccttatcggcggaacacatatttccgataatttagttggaacgaagtggtcaaaattacttatcaataatgcattcagtggtttatcggcagcattaaacggagaatacggagacattcttgaccatgaaatcggcattgttagtgcagtccatatcgcagatgagacgattaaggttggacacgccaatggtgtcaaatttgcgaaaatgggcggccttgatttagaatctttggaattaagaagtgaaaatgatattcctgaacgtatccaaacttttaggtcagccatggcaccatctaggctgctaagagcaagtatgctccaggatcttgagaaaaaacgcaaaactgaaattgattatattaatggagttattcccaaaatggcagaaggtacgggcatttcaacaccttttcatgatttggttgtagcacaagtcaaatgtgccgaggaatctcaaacagtgcccaattttgatacaaatataaaagcatttgaagagttattacgtatccgaaaggaaatgtgatatataggaaagagagaaagggattgctgcggcggtccttttttcttggttcagcaagcggaagaaatatacgtaaacaaacgggtgcattagttacattaatgttcttcgctatgaattgaacggcgcctttattgattccttttcagcaaaaaaagctttcggcacctctctttgatgccgaaagcttttttattgtttttttctgtgtgcttcattgagctgtttaatatgctgtatcgcagctttgatgccctctttggcgtccgggtaggattgattccaatgtttgacgagcggaggcatgctttttgcgatatgtgtatacaaaatccactgcctgacttcttcctttacatccgggtttgtttcgccaagcaatagttccgtgtatttctcaagcaggccgtccagctgctgctgcagtttctcctccataccgttcccttccctttttcatgattatgacaatcgggcggtgagggccgcttcctgcacgatacatctgccgcgtccgtgcggaatgcaaagcggcgtgccgaacagcgggtcttgcgttacctggcagttcatcgcaaagacctgctgtacaagctcgcaagtgatgacttcttcgggacggccctctgcgtaaatctgtttatccttaatggcgaccagataatgggcataacggcatgccagattgaggtcgtgcagcaccatgacgattgtgcgtttttctttttcatttaattcaaacagcaaatcaagaatttcaatttgatgcgtcatgtcgagataggttgtcggctcgtcaagcagaatgatatccgtatcctgagcgagtgtcatcgcaatccatgcgcgctggcgctgtccgcctgacaaggaatccaccggacggtcggccatttcctcaagcttcgtcgctttaagcgcttttgccactgcgtcttcgtcctctttggaccattgcttcagccagctttgataagggtatcttccctgcttcacaagctgatgcaccgtcaggccttcgggagctgacggactctgcggcaaaatagcgagctctcttgccacttccttcgtcggaagcttagcgatggcttttccttctaaaagcacagaaccgcccctcggtttcatcagccgggccaatgaacgtaaaagcgtcgattttccgcagccgttgcttccgatcaatacagtgatttcgccttttggaatcgcgacatccaattcgtcaatgataacagtttctccgtaccctaagctcagcgtctctgtagaaattgcactcataccgctaaccgctccttttttgagtttcccaacactatgtatataaacaaattgcctaaacattcaacgtgagatcatgattatattgtaacagaaattaatgactctgaatatcattatcaattagttttgggcaaaaaagcagcgggcggcagttatttttttatttccgtcatttctccgtcgttctttttcagtttcaaataaaaatggtcatagcggctgtccaaattaaaagccgagagcacctgccggacgacctcgctttcctgcatccggctgtttacagcaagttctccaaggatcatcttcatttcatcaagcgcttcctcgccctctctgtgaacccctgagagcttgtcccggatgtcagccttttcatgaccgcctttactttcatacaaaccttcatagcggttatgctctccgggtccgtagctgacgcgaagggaaaagctgctgtaaggaaccggcttcgcggatgacacgggtgtgctgtcttgttccgcttcccgtttttcttcattcaatcggcagccggcaatcagcatcagcgtaagacataaaacgcccgccgtcctgaaccatttcatgcgattcactcccattccattccgatcgtttttaggtatttccaagggaggcggctgtcattcattaaaaaaaaagaaccggagcggtaacactccggccggttcatctcaagattatcattcagtcagctctaaaaattcccgcacatcctgtacggcaaggcggaccgcgtcttcccaaaacgaccgttccgtcagatccgctccaaggtgcttcatcgccaaatcctcaacagtcatcgaagccgtgtcacacaaaagcgcgatatatttttcttcaaaatccgctttttcccgaagagctcttgcatatattccaagcgaaaataaataaccgaacgtatacggaaagttgtaaaacggcactcccgtaatatgaaaatgcagttttgacgcccagaaatgagggtggtattcccctaatgaatcgcaaaatgcttctttctgcgccgcttccatcagttcattcagtttctcagccggaacgatgccctgcttgcgctcttcataaaaacgcgtttcaaataaaaatctcgcatgaatattcataaacatggctacgcttctttgaattttatcttcaagcaagaacaccttttcatcctttgtctccgcttgtttcaaagcggcgtcggcgacgatcatttccgcaaaggtcgaggctgtttcagccacattcatagcgtaggctctgttcagctgccgcacttgaagcatggcctcctgatggaacgcgtgaccgagctcatgcgccagcgtcgatacattcgaagcgcttccggaaaacgtcataaaaatccgggattctccgctgtcgggaaagctggtgcagaaaccgccgacccgtttgccgctgcggtcttccgcttctatccaccgatcacggaacgctttttccgtaaatgcggacagctttttgccaaacgtcgaaaattggctgacgatcagattggccgcttcatcatatgtatattctttcggagcctcgccgatcggcgcgtccacatcataccagttcagccgctcaagccctaaaagagacgcctttcgattcaggtattcggcaaaaggctttttatgatcggtaatgacctgccacatgacatccagcgtttcttttttcatccggttgatcgcaagcggctcttccaaagcgcttttccagccccgcgctttatagatttccgtgcggaagccggccagatggttcagcgtgctgccgaaaagctcctcttctcctttccacgcttcattaagctctttgaacacttgatgtctgatgcggcggtccgggtgcgccatcatattttccgcttggccgaccgacagctctttatcctcaaacggaatcttcattctgccgacagccgcattatacaggtcgccccatgcgtgatagccgtcaacggccaggccttcaatcagcctttcttctgaagcgctgagcttctctttgacacgatctcttctctcatttaaaacatatgtgagatcctgaagttccggtttttgcagcagctcctcccagaccggctcgtcaatccgggcaagtgtatcgtcaagggtgaccagagcggatttaaaatcactgctcagctgattgatccgcgccctccattcattcgctttctgatcatgagtgttctgagcctgaagacagccgacgaacgctcccgcctgcctgatcatgatcgctgaccgttcaaacctatcaatcagattgatcatctcccggctttcatccgcatgcgtcggaactgtaaacgcttcaaccgcatgttgaaaagcgcttagatgctttttgagctgttgtatgtattgctgaaactcttccgaccggctcccgccctcaaaaatggagtttaaatcccatgtttccttcaatccctctaatgccatcttttctttacccctttctatccgaagctgactccattataaaacaattctgacatatttccgaacgatttctccttctttccgcgagatgttatacactatgagataagaacaaacggggaggattataagatgaacagaaaaattgccattgtaaccggcgcgacgagcggattcgggctgctgacagcgctgaagctcgcccggtcttatcacgtcatcgcaacagccagacagccggagaaagctgaaatactgaaagaggccgccgctcaagcgggtgcatccgaacatgttacggtcgtttctttagatgtgacaaatgagcagtcggtgtctgacttcgggaacaccatcagcggtttcggaccgattgacctgctcgtcaataacgccggcactgcgtacggggggtttattgacgatgtgctgatggaacattacagacagcagtatgaatcaaatgtattcggtctgattcacgtcacaaaaaccgtgctgccttatatgcgaaaacatagcggggcgaaaatcttcaatatcagcagtatcagcggactgaccggtttcccggctctatctccgtatgtctcttccaaattcgcggttgaagggtttacagagagcctgcgcctcgaactgctgcctttaggaattgatgccgctttaatagaaccgggctcctacaaaacgtctatatgggagacatctctctccaatcatcttacggcacccggcaaagattcgccttattaccgctattatcagcaaatcgaagcttacttcaaagccaacgcatccaaaagcggcgatcctgatgacgtagcggagctgatttatcaattggcacaaaggaaacggctgaagaaactgcggtatccgatcggcaggggcgttaagctgacattggctttccgctcactctttccgtggtccgcctgggaatcgattataaagaaaaagctgttcacttaaacctaaattataattattataatttagtattgatttttatttaatacgtgatataattaaattatcagatcacagggaggacgatgaatatgaatacacaaaacgcgaaaaaaactgaaactcttgttgagaaatcaatgaacacacaattatcaaactggtttatcctttactctaaactgcaccgcttccattggtatgtaaaaggccctcatttctttacgcttcatgaaaaatttgaagagctgtataacgaagcggcggaaacggcggatgccatcgcagagcgacttctggccatcggaggacagcctgcggcgactttacacacttaccttgaacaagcttccattacggatgaaggccaggaaaaaacggcttctgaaatggtggaatcactggttcaagactataaacaaatcagccgcgaatcaaaatttgtcatcggcatcgccgaggaacaaaatgacccgtcaactgccgacctgtttgtcggattagttgaagaagcggacaagcatgtgtggatgctgtcagcctacttgggagaataacgaaaaaagctgaacctcagttgcaggttcagctttttttatgcgttcagcttgcgctttcggtttgtttcgttaatgtgacgttcagcgtctttttgcttccgtttctgagaacttgaacagtcgttttatcgccgattttcagctggttatataagatctgtctgatatcggcgctgctgccgacatctttgccgttcaattgtacaatgacgtcatttgatttgatgcccgctttcgcagccggcgagccggactgcacttcttttacgtaaacacccttagacagctggtcgccgaacagtccgagcgtgttttcctgataagtttccggcacttgcgccatgtcaatcatctgcacacctaaaaatgggcgctcgacttttccttttgcaagcagctggtcgactatcggttctacatcattgctcggaatggcaaagccgagtgactccacgccgttttcactgactttcatgctgttgatcccgataacttggccgcttgagttgattaacgggccgccgctgtttccggggttaatcgccgcatccgtctgaatcacgttcatttccactgtgccttgggatgtatcggcgtctaccgttctgttcagcccgctgatgacaccttgtgtgacggtgccggaaaactgctggccgagcgggttgccgatggcaatcactttatcggcaatgcggagcttggaggaatccccgaagctggccgcttttttgacattggacgagctgatttccaatacagccaagtcactgatggcatcctttccgacaagctttgccgtttcggttttcccattgtaaagagtgaccgacagtttgttcgcaccttctacgacatggttgtttgtaatgatgtacgctttttcgccgtcttttttgaagatgacgcctgaccccgtgccgctttccgtttcagagcttgaaccgccgtcaagtctgaactggctgctttgcgaagcttggtagttggacactcccacaatcgcgggctccaaatcttctaccatatccgctacgcttgaggtatttttcaaaggcgttgacgtaaaattcgaagactgaacttgtttcgtatcagaaacggcttctgtcttatgctgctcactcggcagattcggcacaatgccaagcacgaggcctccgccgataatgccgcctaaaatcgggctcagccaagcggctctccgttttttttcttttttcacggcagccgttttttcaaattccgtaccggccgccgtctcgttttccgcttctttcgagactgggccttcgagcagctcgggctcctgatggctgatctgctgctgttcatttctgttttgctccgtatgtgaaagatctgactgatcgcggcttctgccgtcatctcgatgatcgttcatattcacgcacactccttcagcatgttttcattctatcgattacatattcatcgcatgtacaagttctattgtcccaataataaggagaaaagcaaagctccaaaacaaaatgtgtttgaacatgttatcttccccgctttttttcttcctttcttcccttatacacatcataaacaaacattgtgggataaaaatgaaaagaatatgtgaaattatgaaaatgcggcttgagtgtgttaaaactagtataatgacgttgaaaggatgtgaaatgccttgtcatacaccatttatctagttgaagatgaggataacctgaatgaactgctcacaaaatatttagagaatgaaggctggaacattacatctttcacaaaaggcgaagatgccagaaagcagatgcagccgtctccccacttgtggattcttgacatcatgcttccggatacggacggctatacattgataaaagaaataaaagaaaaagatcccgatgtgccggttattttcatttccgcgcgggatgccgatattgacagagtcctcgggttagagcttggaagcaatgattatatcgccaagccttttttgccgagagaacttattatacgggtccagaagctgctcgagctcgtgtataaagaacaacccgccgcaaagaaaaccggcatcaccatttcttcctacaatgtgatcgaagatgcccgagaggtttatgatgaaaccggcagcctggtcaatttgacgtctaaggaatttgatctgctgcttttatttcttcatcataaaggacaccccttttccagagaagatatcctgctgaaaatatggggccatgattatttcggcactgaccgggtggtcgatgatcttgtgcggaggctgagaaaaaaaatgcccgggttaaaggttgaaaccatttacggattcggctacaggatgatgacgtcatgaaaaataagccgcttgcttttcaaatatgggtggtcatctcaggcatccttttagccatctcgattctgcttctcgtgctgttctcaaatacgctgcgtaattttttcacggatgaaacgtatacgaccattgaaaatgaacagcatgtactgacggagtaccggctgcccggatcgatcgagcggggatattacagcgaggatgcgaccgcgccgacgactttccgatccgttcagcacgttcttctgccggaacgggaggaatcggccagtgacaaagacttgaactacttttcttcttcctttatccataaggtgtacaagctcgcgggccgccagcacagcgtcacgaaacgatacagcgcggacatcagcggtgaaaaagtgtttttcgtcattaaaaaaggcctcaccattaacggccaggatgcgatgatgctgtcttacgcccttgattcttatcgtgatgatctggcattcaccctgttcaagcagctgctctttatcattgccggcgtgattttgttaagctggattccggcgatttggcttgccaaatatctctcgcgcccgctcgtttccttagagaagcatgtcaaacggatttcaaaacaggattgggatgatccggtcatcgtcgacagaaaagacgaaatcggaaaattaggccataccattgaagacatgcggagcaagctggtgcaaaaggatgaaacggaaagaacgctcctgcaaaatatctctcatgatttaaaaacgcctgtcatggtgataaggggctatactcaatcaataaaggacgggatttttcctaagggggatctggaaaccacaattgatgtcattgaaggcgaagcagaaaaacttgagaagaaaattaaggatttattatatttaacgaagcttgattatttaatgaagcagcgggtgcaccatgagacatttgacattgtgaaggtcacggaagaagtcattgaacggctcaaatgggcccggaaggaattatcgtggaccgttgatacagaagatgcattaatgatgcccggtgatccggaacaatggagcaaacttcttgaaaacattctcgaaaatcaaatccgctatgcagaaacggcgattcacatccggatcagccaaaatcagcagcagattgtcatgacggttaaaaatgacgggcctccgatcgaggatgagatgctatccagcttgtacgagccttttaataaagggaagaaaggcgagttcggcataggactcagcatcgtaaaacggattttaaccctgcataaagcatcaatttcaattgaaaatgaccaatcgggtgtaatctaccgaattatcataccaaagtagactgtagtgtttcattgcagtctttttttatgtgaaggaatagccgttaaaatctctgtagtttgctttcagcggtttttggcattgatgaacccatttcttttcacaaattgtctttttcggatatttcaccttttcgactttaattcctctgtttcgcaagcggctgatcatttcatctaattctttcattttcagattcaccctttcgccagaactttgaccattcggtcagctcactttataatataaataaaacaaaacaaaaaaacaagttacaatcaggttaaatttacggaatatcaatatgaccatatagtcatacaagagcaagcacaagccagcctcctggctccgaaagggtggaaccattgaaggaaaaagaaaagctgatcattgaagcagcaattaaactgtttgcccgaaaagggtacaaatctacatcggttcaggaaatcgccgatgaatgcaaaatctcaaaaggcgctttttatctatactttccttccaaagaagcactgcttctatccatgctgaattactactatgataaaacgtttacccgaatcacgacgatccaaacggagggcgacagtccgagagccgcttaccaaaaacagcttgcggtgttttacgaatcgattctcgcccatcaggattttattaccgtgcagatgaaagacggttcacttccttataccgaagaagcggcgcagtgcggaaagagaatccgccggtcgatcctgcagtttcatatcgacagtcttcttgcgatttacggagaaaaagctgaaccatacacagccgagctttgttttttaatagaaggaatcagtcagatgtatcttgaatatctcattctgaccggccggtccgtacagccttcgcttttggcaaataccgtgattcacagaattgatgacatcgtaaacggaatggcggacagacatgatgaagcgtttatttctcttgatgaggcaagctcactgtttgggccccttcataacgggcagcccgatcctttaagccaatcgatcttgcagaccctccgcacgcgcatcggcacgatggataagacgcaagcatctgaattcaccgagagcttggatattctggaagcggaaatgaagaaaaagtcgccgaaaccggcaatcatcaaaggaatgattttgaatttgaaggaatccgacctgctggctgaagatgcagaacagctcagatttttactgaaacagcagtttatttagaagaacggccgcaatgactgcagccgttctttctttttatgctttcgggtgcaccatatcttccggacgcaccatttcattaaattgttcttctgtcagaaggttcagctgtaatgccgcttctttcagcgtcaggccttctttgtgggcaagcttggcgattttcgcggcgttttcataaccgatgtgcgggttaagcgccgtaacaagcattaatgagttagagagattttcctgaatcgtctcttggttcggctcaataccgacagcgcatttgtcatggaaggaattcattccgtcactgagcagctgcacggtctgcaggaagttatagataataaccggtttgaagacattcagctcgaagtttccttggctggccgcaaatccgattgtcgcgtcatttcccatcacttgcgcggcgatcattgtcagcgcctcactttgcgtcgggttgactttgcccggcatgatagagcttcccggctcattttcaggaatgacgatttcgccgattccgcagcgcgggccgcttgccagccatctgacatcgttggcaatcttcatcaggtcggcagccaatgcttttaacgcgccgtgaacgtgagtgatttcatcatggcttgtgagcgcgtggaatttgttaggcgaactcttgaatgtctgccccgttacttttgtgatttcttccgcgacgaattcaccgaactgcggatgggcgttgattcccgtgccgactgccgtgcctccgatggcaagcgcgcggattttttccgttgactcaagaatcatttctttcgaacggtcaagcatgtatacccagccgctgatttcctgtccgagcgtcagcggagtggcgtcctgcaaatgcgtgcgtccgattttcacaatatcctgataagctttcgctttttcatcaagcgtcgcgcgcagctgatcaagcgccggaacgagctgctcatatacggcaagaaccgccgcaacgtgcatcgccgtcgggaatgtatcgtttgagctttggctgcggttaacgtcatcattcggatgaatcttcagctcggaatttttttctttcaataaagcagtcgcgcggttggccaccacttcattcatgttcatgttgctttgcgtgccgcttcccgtctgccagacaacgagcggaaagttatcgtcgtatttgccgtttaaaacatcgtcacatacagcggcaatcgcctgtgctttttcagactctaagttgccgaggcgttcgttggcgatcgctgtgcttcttttcaatattgcaaacgccttcacaacacgctgaggcattttttctgaaccgattttgaagttctctttgctgcgctgtgtctgagcgccccaaaatttatctgccggaactttaacttctcccatggtgtctttttcaattctgtagtccatttatgtatccctccataacagttgcttcaccctgagtattattcgccagtaacagatgaaaccctttttatttttcggccttggccgtttttaatttcagctcaagatagacgcgcgaatccttagagtatttatacttcggatttgttttacggtattctttcgacgtgtaagccacttcgtaatgcgcctcaaatgatttgatgagctgttcaatttcttcggcatttcctgccagtctgacttgtgccacatctctcctccgctttcataaaaaacttgtaccattaaatactttatcatagtatatcatttttttaacaggaaaagataacctcaattaaggattggaaggcgggtgactgtcgatggcgcaatcggaattcaaggaatacatacacgttaatctggcactggtgcttccccacgtagagcagaatgatgacctggttcaaaataaaaagatgcttccaaacgggcttgttttttattatatgtatctgagggaaatgaacgacgaagacaaagtaaaagaggcgattgaaacgctgcttcgggaggaagacactctgacgctggatacggtgacgaaacgtcttgataagatcgacgcccgtcccgtctttacgtcgaaggaagccgtcatctccattctgcggggaaaatgcgccgtgtttattaacggacttgacagcgtatacattttgtccacgggaaaaagagaaaaaagaagcgtgaatgaacccacatccgaaaaggtcgtaagaggtccgaaaatcgccttcatagaagattctgatacaaacgtcgccatgatcaggcagcgcacgaaccatccgaagctgaaaacgaaaaaggttccgatcggagaaaataagttaaaatacgccacggtcatgtacatagatgataaggcggacccgtctgtcgtcagcgatgttgtaaagcgcctcagcgaagtgaagatggacgacattcaggattccggaacgcttgaggagcttattgaggataataagtattcgccctttccgcaaatacaaaatacggaacggcctgataaagtctcttccgccttgttcaacggccgcgtcgccatccttgtcgacaactcgccgtttgcgctggtggttccggcttctttaggaattttaatgcagtctcccgatgattattatgaacggtggatttccgcctcgctcatccgggtgctgcggtttacgtctatttttattacgctgtttttttcgtccatttatatcgccctcgtttcgtttcaccaagggctgctgccgacatcgcttgcagtcaccatcgcggcgaacagagaaaacgttcccttcccgcctatcattgaagcgatggtaatggaaattacgatagagctgctgagagaagcgggcttgaggcttcccagcccgctcggccagacgatcggattggtgggcggagtcgtcatcggccaagcggccgttgaagcgaatattgtcagctccatcatggtcatcgtggtcagcattgtcgcgcttgcttcatttacggtgccgcagtacgggatgggtctgtcattccgtgtgctccgtttcatttcgatgtttaccgccgcagctttcgggctgtacggcatgattttatttatgctggcgatctacactcatttatcgagacagcgaagcttcggttctccgtatttctcgccgaatggatttttcagcttaaaaaacgcaaacgactctattctccgtctccctattaaaaatcaaccaaaagaggcgaaaaacgtaaatgagccagaaaacaactctcaataagcttacaagctatcaagggacggcattgatttccaacacgatgctcggggcgggactccttaccatgccgcggtcgctgtcatcaagggcgaattcgccggacggctggattgcattatgtctggaaggcgtcatctttatctttttgatttatctcaatacgctcattatgaaaaagcatcagtacggatcattgtttgattatatgaacgaaggcctcggcaaatgggcgggaaatatcgtcaatcttatgatctgtctctattttataggagtcgccagcttcgaagcccgggcgatggcggaaatggtcaagttctttttattggagagaacgcccgtgccggttacgctgtttatctttatcgcctgttccgtttatttaattatcggcggcatgagcgatctcggcaggctctttcctttctatttaacgattacgatcattattttgctggtggtgttttctttcagctttaaaatatttgatctggacaacctgcggccggtgctcggacaggggttttctcccgttatggcttccttgaccgtcgtttctgtttcattcttaggaattgagattatgctgtttctccctgagcacatcaaaaataaaaagcacacgttccgtatgtcggccatgggctttggcatcccgattattttatacatcattacctacgtgctcgtcgtcggcgccttaaccacccaggatgtcaaaacaatgatctggcctacgattgcgctttttcaatcatttgaaatcaaagggctttttatcgaaagattcgagtcttttttgcttgccgtctggattatccaatttttcgccacctatgtatcgtacggatatttcgcgacatcgggtcttaataaaattttcgggctgaagcacaaaaagggcatcattttcgtaggcattgcgacattcttcggatcattgatgcccaaagacgctaacaagctgatgctgttcagtgatattctaggctatatcttcttggttttctttttgctgcctttactgatgtttgcagtcgtcgctgtgaaaaggaaggtgaaaaaagcgcaatgaagaaatatatcgtaatcattctttgcacattgcttttagccggatgctgggacagccgcaatatagaagatttgagtctcgttatcggcgtcgggctcgataaacccgaggaagaaaacgtggaagtgacgcagcagattctggttccgcaaaaagcaagttcccagcagtcgtcgtcagggagcgacacgacaaaggtgacttccacttccggagaaaccgtccatcaagccttacgaacggcatcattaaaaaatcaccccgctttctcccagcacttgcgtatcatgctgttttccgaggcgctgttaaaggacgacatcccgcttgacgcattgatgaaccaatttatcagggacaacggtacgagaagaagctgcaatgtgatgacggtgccggataaaacgaaagatattttcaaaatcagtgaccagggagagcctgcgtcaaatacgatctatgacttaacggagaataatgcggtcaccatccggatgatggagcccgtgacattgggggaaatatccgagagaatcgccaagggcgagacctttgcccttcctcaagttcgcaaagtgggcagcagactggaaatctggggcgctaccattattaaaaataaattctggtatgcgaatctaactcctttacaagtccagaatatgaacctgttcacaggcacggtaaagggaggcgttacgtttgcaaagcatgacaattattatttgtctttcgaggtattttccagcaaatatgatgtaaaaacacaatataaaaacggaaaattcaagtttatcgttacccggtttgttgaaggccgtctatctgaggattggaacccgaaagaagattccttcaaggagtcctatataaatgaaatcaaaaacgcggtaaaacgcagcattcattcagatgtcatggcattcattgattacatgcagcatgagttgaaagtggatattaccgggttaggcgatcaagtccggattcattatcccgataaatggaaaaagatatcctctgactgggatcatcacttcagtgaatcggatattgaatacaaagtcaaagtcgccatcagggatttcggaacaaagggaatgtcccaatgaccccgttcctcgggagagtgtgctggcaccgctctccttttcttatgtcacgagatgattgcggtgggcatatacggctgcctgcgtgcggtcactgacatcaagctttgacaatatattcgtaatgtgggttttcaccgttttaatcgtaatgaacagctcttcaccaatctctttattcgtcttgccttccgcgacgagacagaggatttccagttctctttttgtcagcgtttcatgcggaagctgattctctgaatggcgcagccttgacagcacttttcccgccaccttcgattcaagcttcggttcgcccttggcagccgctctgatggcttcggctatttctgccgccttggacgttttcagcaaatagctgagcgctcccgcttcgatcaccggatacactttgtcgtcatcaataaagctcgtcagcacgatgattttcgggtcattgagtgtcgcgcagatctgttttgtcgcttcgataccgtccatgccgtccatgacgaggtccattaaaatcacatccggcaaaagctttgcggccagatcgacgccctgctgcccgtctgatgcttcaccggcgacttcaatgtccggctgtgcttctaaaaatgcggccagacccatcctgaccatttcatgatcatcaatcagtaacactcgaatcactgtcgttctctccttttgttttctgataaatcgggactttcacgtcgatctgcgtgccttttccctttacggagataatttccgctatgccgccgatttcactcgctctttccttgatggaatgcaggccgtatgaggatgctttcacttgatccatcgtaaaacccgccccgttatcaatgactttaagctgaagtttttgatgtttcgcgccgagcctgacggtgaccttggtcgcctttgaatgtctgaaaacgttggaaagcgcctcctgcacgatgcggaacagatggtcttcaacgccttttgacacacccgtatcgctgatgtcccactcaatatccagcggctgcttcgctttgaactcttttaacagctcaatcagcccttcttttaagccttttccttctaaagtgacgggccgcaaatgcaatagcagcgctctcatctcgttttgcgcttcccccgccatatgttcaaccatgcgaatccgtttgacgattttgtcatccgcatctttcacctgctctaagacggcggatgtcatcatagaaatggcaaagagctgctggctgacggcatcgtgcagatcgcgcgccagccgctggcgttcttcagtgatgaccgattttttcatttgatcctgccattccgcacgttcgttggagagcttttgcagcgatgtgacctggagctcgacccgcttggccatttcgttgagctgatctgccgccagaccgatttcatcatcgccgagcggcggcacccgataagcaaaattgccgttttcaaatttcaaaaccgcttcaatcagtgtatccatccttgttttcaggcggccgccgtatacataaccggaaatcaatcccgccgaaagagacgccagaagcaggatcaccacaaacggaataccgaaccagccggaagaaaacagcagcatcgggtcaagcccgtaatacagcagcatcagcgtaataaacaccgcgcaaaggagcagactgagccccgcggtcatccgcatggcacgccactgaatattggcgagtaattttttcctcataaatacttcacatccacatcgccgatgaataacgaaattgaaattttaatccgccgcggcgagtcgccgtactcagacgatactttatacagattcgggctcatgccgcttttcttagagccgagcaggttcatatcgccgataaaagccgatgaactgacggacacttcgatatccggcgggacgtacacatcgacattgccgatgacaccgctgatggtcatcgtgctttctccttcgggaatcatcgcttttgacaaatcaattttcacatcgccgatgaatccggaaacatttaaatcattcagctcaaacgggtccttcatcatccggagctcgccgataaaaaagctgcggaggtccggctgtctgctttccgtctgggcggaaggctttggctgctcttctttttcaagattgattttcttctctttatgttcatgcacgcgctttcctttcaggagcctgtagcccgcgtatatgagaaaggcggcgaaggcatagccgaacaggttaaaggtggcgctgaacaggttcctcaaaaataaaaaagcggcgaagatatacaggacggagccgagccagccgcgggaatatttattaaaaatataacctgtgatcagaaaaaagagcggccaaaacaagaagtcgccgatgccgataatacgcaaaaacatgctgacgcctaataaggcgatgataagtccgagaatctgtttttttgccatcagctgcttgcccctcctttccttgactattgcagtgcaatattgccgctcgtcacttttatatcaatcggcctggcgccgctgcctttcatgccggtaaatgccccgccttccttactcgttttctcaaaggaataagacggccgaatccttccgcttgccgtctcggcgttcaccgtaaaacttccgtctttcggcaggctgatcgctgcgctgccgctcgcaagcctgacggatacgggagcatccgccgtctcaagcgaggcatcgacactgccagaagcgacccgcacgtcaagggcgcccgccacatgttgaagcccgacatgtcccgaggataaacggacagcccccgtttttgccgcaaggcctgctgctgtgagattgcccgacagccccttcgcttcaaacacatccgtcttcacgtgcttcagcgacatgttcccgcttacagaacggacgccgaggtgcgcaagagacagccccttgtttccgtcgacggcaatgctgccgcttgatgtatggacggtgatatcccgatgataatcatacggaatgcggacaatcagcagagggcgctgaaagagattcagaaattggaaccctttctccttcgctttgagattgagggtctttcccctgttttggacaaacattttccccgccggtcccgtcatgtttgccgcgatatcattccgcgcttccgcgatgattttcacatccgtctgttccgatgaaaccgacaggctgttgacggcacgcggcggtatgcttgccgattccgcttctgtttcgcacagcggaaaaaaacgcccggcaaacacttctttcaccaaaaacagacagcagatcagaacggacgccgccatcagtcctttggcaatcttacgcttcattacgttccatcctttttcattcattttattataaaggaaaagccggagaattgatacgtgcgtatagggaagaggcgtaaacgcgccgatcttcccttgtgcacattattcatgagccgctttttgacgctctgttttttccagagaaagcgagcgcattttttcaatctcagcttccacctcgtctgaatattgggagcggctgtattctgtgttcgcctcagctgaagtgccgtatttgacgcggacttccatttcttcaatgcggctttccattcgaaggaactctctgtaggcgctttcgctgtcaattttgtcgaaagaagcgttcatatgttccttcgcatttgccgcgtttgcgcgggcgatgagcgcctgttttttatcctttacgtcgcggaggcgcgtttctaaagtttccagctgctctttcagctctgccagctgtgttttcgcctgctcatacgctttttcatgttcggccgcttttccctcaaggtatttcatttcagtcagagcctttttcgccagctcctcttccccggcgtcaaaagcaagctgagcctggtttttccgttttgccgccgtttcggaggcatcttcctgttttttcttaaactgatggacgatcgtgtgctgtttgacaatcgtttgtttcgccttagcgatgtcactttccatatcacgcacatattgattcagcatgactttcggattttctaatttatcaagcccttcgttaacagatgcgacgaacatatttcttattctttttaagaccattttgtcttcctccttattttttcttcagaaattcttcccattcagagtcaaatccggattgatagcccggtgatgccgcttccggttcatactggcgggaagcggtgtctgagccgccctgcttcatcatcttccacccgaaatacaccatggcgccggccagtccgatcgcaacgataaatggaagagaaccgacgagaatcatagctccgatgacgcccgcgatgatacccgataccgcccggccttttgaaaaacgtttgattccccagtaaagcatcagacctccgatcgccagcgagatgataaatgcgaaatggcctcctccgaaaaagacagaaagtccgaacacaatcagcagaaagccgcctgccgttttaccatttatattcatgcagatcctcctttcgttttccttgtctttactataaacaaatcccgcggccggcaaaacgagtcagagattgattttcatatcagaccggagtcgtataagcccccggaccttcgcataaaaaaacgccgctgcaccggacggcgcagggcgtttcacgaaaaatctatattctgatgctcgcttctttttccctgatgagatctgagcgttcggctttggccagcttcgtaaagaacaatattccgagaccggacaggacttcaacgagaccgccggcggcaatgacttttccgggaccgaaggcgttagccgcgtatccgcaaagaaccgcgccgagcggaatggatatgtttgagatcatatggatgacggcatagacttgcggctggtcatcatggtccacagacgtctgaataatcgtatattccggcacattaatagcgctgacggcagatccgaacgcaaacgcggcgaggaagacgagcggcagaaaagtgttgaggccggtgatgaaaaatgccgctccttctatgattcccgctgacacaaacaggaggccgtatttgttcaccttcaccttagccaaaataaaacccattaaaaaggctccgcccgtgcctgtcgctttcaaaagcgagtagatgatcggcggcatgtttaaatcttcggcgacataaacggcagagagcgcctcccacggagcggccgcaaaattcatgaagatacaatagatggcgagcgggtataaaatctggtgtttcctgacaagaacgaaaccccgtttgagccttccgaaatacgtcccgcgctgtctgacggcgactgtatcctgtttggcatgctggacttggtatgacataaagagtacgagaaaacctgatagaagatagaatataagagcgataaacaaagaataagcgggactgataaatgttaagaacaccccgctcagcgtaatggcggcaagcctgacgatctggcctgatgactggatgaccgcattcgctttctgcaggctgttttctctgacaatattggggattaatgagatagatgcaggattataagcggctcccgtggctgaatgcacaatcatgagaagcatgacaaaccataaaggagaaaaaccgttaaagtaacagaccggaatgatcaacacgaccgccgcgcgcgtcaggtcggagaaatacatccagaatttcagcgtatgctgcttcataaaaggcccggtaatcggcgccagcatcgcctccggaaggaacgtgaccgcaatgagcagggacgtgccgatcgcgccttccccgtcaaaaattaaaaaccacagaatggaattaaaggcaaaaccgtcgcctgacaatttaaccagccttgagataaacagaagggtgaaatttttattccagatgctctcgctcttattatatgtatccatctatcaaatcccccattattttacaatgtttcttataatatctcattttttaatttttcagtcaataatgcataagatacattttcctcctgtcaataaaggttcaattgatggatatctctataaaaaaacagccggcttgctgctgccggctgaacaaaacattattcatcatcacggaataccgcggcgcttctttcatactctatatcctgaacgccctgtcttgcgttaaccgctcttgccgccgcgaaaaaataatcagacaggcggttcaagtaacgcatcaccgtatcgtttatctcttctgttttgccgagtttcacgatgagacgctcagcccgtctcgtgacggtccgcgcgatgtgaagctgagcagccgccttatgcccgcccggaagaataaatttctcaagcgggggcgcttcagccgtgtaacggtctatgcagtcttccaatgcggaaatagatgtctctcttaatgtatagcttctatgttcagtgaccgtcgccaagtcgccgccgcagtcaaacagctcatgctgaatgtttcggagttcggctttcacatcaccgcaattctcacaatcatcaagctccgcaagcgcaagcccgataaagctgttcagctcatcaatcgtcccgtagctttcaacccgcagactgtctttatccgttctgccgccgatcaggcttgtctgtcctttatcaccggttttcgtatacagcttcatcgttgtattcctccttcttccgccgcttttacacatgccgcggttcctcttctgacggctctttccgcgcgagggacgtccatcgcctctcctgtctgcaaggcacaaatgacaatgtcgccttttgcctgtctgccggaaagagcctgcattctcgcttcagccgctgccgttaacagccgtacaaatccctgttccgataaacgtccgctgatcagcacccaaacggtatgctgcgcagtcacggcaattgtgaccgaatcaaacgtacggcagatcaaaccagcggccgctgaaccggaaagccggcggctccacgaaaagcccgggccgtcagatgcggttgacaacattctgaacggccgttctgtatgaagcgttacggtatttccgcttttgtttatctgagaggcgaacggaacgttgacgggctctctttcctcccgcgcttccggcatgaacgcgatcagcggtttcggcgacgattgctgggcaacagcgctgacggtgatgccgtaaatgtcttcaatcgtctcttttttcaaagcctgatccggcgtctgcttcggaaaagcgcgcccgtctttcatcatcaggagctgatcacaatattggcctgcggcgtttaggtcgtgaaaaatactgatgaccgtcaggcctctttctctcgtcaaccgcttcaccgtatcaagcaggtctttctgatatttgagatcaagaaaggtcgtcggctcatccagacacagcacctcaggctgctgagccagcgcctgcgccagaaagacgcgctgccgctccccgccgctcagattgcggacggattgctgcgcatatcggtcgatgcccgtcatttccatcgcttcccggacaatgtcttcgtcatgttgatccatctgtctgaagagtcctttttgatacggatatctgccgaaggacactgtttccttaacggtaaatgtaaaagcttgctctgtatgctgcggcaaaacggccatgattttcgcaagttcccgcggcttgtatccgccgacgggcctgcctgctacgagcgcctcgccttttgacggagagagcattcccgtcagcaatttcaacagcgttgtttttcccgagccgttcggaccgagtatgccgacaaattcaccttttccggcggtaaagctgacatcttctacaatcatccggcctccgtacccgccggacaggctgctcaccctgatcataagcgtttccctccatgatgctggcgaagcagaatcaaggcaaacacaggcgctcccgccaaagccgtcataatgccgatcggcaattcgacaggctcaatgacggtgcgggaaaacaaatccgccaaaatgagaaacccggcgcccgtcaatgctgacagcggcagtaaatggcgatgatccgtcccccacaaaagccgtgtcacgtggggaatgacaaggccgacaaatccgatcgtccccgagacggcaaccgctcctcccgtcagcagagatccggcggcgatcatcagccattttctttttcccgtactgacgcctaacagccttgccttttcttctccataagtcataatgtttaattctctgccattgataagcagaagcgccgtcccggccagaaaaaaaggcagaaacagcgcgacatagccccagcccctcattgacacgcttcctaacagccagcggacaatcgggagcagatcattgcccgttaaagcgatcacaagcgatatgagagccccgagaaaagaattcatgatgatgcctgtcaaaatgagcgtcgaaaccgacatcgacgcatgaacgaggcggctgaaaaacagaaccgccgccatgaccgcaatggctgcggcgatgctgacaaccggtagtgtgaaccggccgatgacgggaatctgaatgccgaaaaacaaggtgataacggctcccgctgaggctcccgaagataccccgagtgtataagggtcggcgagcggatttttcagaagtccctgaaacgccgctcccgcaatggataacgcggctccgacaagggcagccagaacgactctcggcaggcggatattcatcataatatttacattcatagggtcagccgaggatgtccggccgattccgatccaaaaaacgtcggataaaggaatatgcagactgccgattgaaatgccgagtgccgtacaaacggctaaaaacagcaggttgaccgtgtaggccagcgggcggttactttttaaacgtttcaggataaacgctttctgcaagcttctcgacccctttgacaaggcgcgggcctgagcgtgtgacaaggtcgggatcaacagaatagacattgtggtgtttgaccgcattgacggcaccccagccggcgcgtttttccacttcagcggcctttacgccgtctgtcgtaatgatgacgtccggattcattttgacaatcgcttcatctgtcaattgcacccagccggtctggctgccggcagcatttttcgcgtgtatatcttcaagcatttcgttcataaacgtacctttccccgtcgtgtagccgtcaggagacacttcgacgaatactttcttttcgtcttttacagaaatggccgccgctttcttttctatgccggaaaggtcggatttcatcgatttgatcagctgatccgcctgcttttctttgccggccgctttcccgatcatgctgatagatttgtacacgtcttggaacgattgcgcatcattgaccgttaagacggtgatgcccgcatctttcagttgcttcatcgcatcggcggaagcggacatagaggacgcgtgggcaagcacgagatccggcttcagcgcgatgactttttcagcgttcacattcatatctccgactttcggtttttttaccgcttctttcggatatgtatcatttgtcgtgacgcctgcgaccttatctcccagtccgagcgcgtatgtaatttccgtattgctcggcatgagggaaacgattttttccggtgcctgctttatggttactttttcgttcgcggcatccttaatggttaccgggaatgcttcggttgagacggctttttgtttggccgcgcttccttcttcctgtgcgccggaacagccggcgatcacaaaggcggtgaccaaaagcgccgcccagacggcagtgatcttcttcattcttttaactccccctgattatggtaaacgattgtctctttgacattcgtatccttttttcgcagtaattatactataagtctttaaggcttgtatatccggcctttttgcatgaaagcaaattgttcgtacacactaaaattcatcatgtatactgttacacaatggtgtaaaaaggaggattatcatggaattacagcttgaacgaaagctcgttttgattacaggatcaacctcaggcatcggaaaagccgcggcaaaaagctttttagccgaaggcgccgaggtgattataaacggaagaaaaaaagaaactgtggaacggacggttgaggagctttccgcttacggaacggtccacggcatcgctgcggatttatcgcgtcaggatgaggcggatgacttgataaagcgcgcaggtgtaatcggggaagtcgatattctcgtcaataatctcggtttttttgaagtaaaagacttcgctgaggtgtctgatgacgaatggactcggtattttgaagtgaatgttatgagcgccgtgcgcctgtgccggcgttttctgccgcaaatgctcgagagaaacagcggacggattctgaacatctccagtgaagccggtgtcaaaccgcttgcgcaaatgattccgtattcaatgacgaaaacggcgttaatcagcttgtcccggggaatggcggaaatgacgaaaggcacaaatgtcacggtcaactccgtgctgccgggaccgacatggaccgaaggcgtcgcttcttacatggaaggagccgcaaaggctgccggagaagacacagacagcttcgtccgggattattttaaagtgaatgaaccgacatcattgattcagcgctatgcaaccccggaagaagtcgccaatacgattgtatttctcgcttcatcagcggcttctgccattaatggcaccgcacagcgggttgaaggcggcatcatccgctccatttaacacaaaaaagcccggcacaatgggaacttccccatatgccagggcttttttttacatcatgcctgcaaacggaaccggctcccagccgcccgtctcaagctctgctgaaaacaggccgcccgcatgcggctgctcaagtctttcggcttccgtcaatttttccgtcgcggtcgtaatgtataacgtgttcaagtctctgcctccgaacgcgcagcaggtgacgtatttcgccggaacttcgatagatgcaatttccttatgcaaaaacgggtcaatccggacggcacggccgcctccgaacagagccacccacagcattccgtcacggtcaatggtcattccgtcgggagatccttgcgacttcggaaagcggtagaccgttttcggatctgatacggctccggtttcaggatcatatgaataacagacgatttcctgcgtcggagtatcgatatagtacatcaggtttcggtcccgatcccaatccaaaccgttcgaggtggagacctggtcttttattttggcaaggctgccgtccgtattcagacggtacagcgaagcctcctcttctttgccttccatgctcgtcgttcccgcccataatctgccggacggatcgcattttgcgtcattgaaacggatatcttcccgcatgtctttcggctgcttcatcttcgtcaatgtgtcttcccgaagattgtacaggtaaaaaccgtctttcatcgtcatcaccagctcttcctttgaatacaaggccagagccgtgacaaatgatttgaatttaacggaacggttgattccgtcagccggagtgaagatatggagctggctgcccagtatatccacccagtacaggcattgcttgtccttgtcccataaagggccttctccgataactgctctcgtatctgctcgtaatgctgcttccatgtgtgaacacctcttttgcttgtcagtcttctattgttattcccgacaaagcggcgtccaaactcaatcttttttaaaaagaatcgtaatcaccgttccggcgctgattctgctgttgacatggatggttccgttatgaaggtgaaccagctccttggcaatggcgagcccgagtcccgttccttctgacggtcccttcgtattcgttccccggtaataacggttaaacagctggtgaatcgtttcgtcgtccattcctcttccgttatctttcaccttcagaatgagctgttcggctgattcctcaagcacgacccgaatggcggtccctttcttattatgcttaaccgcgtttgccagcagattctccagaatacggcggaaccacgcttcatcaatggcgaaaagaatgtcttcctttttggtttcaaaggcgatgtcatagccttccgagaacgtgtttttcgtgaaatcgttcgtgacgtttctgataaacggcacgacgttgatcagccgccgttcgatcgggagggccgcgtttttgaggcggtatgttaagtttaagtcctcaatcagcttcgacatatattctgatttttcccggacgatctgccccatttctttgacttcttccggggtccagtcgtattgcttcgattcaagcatcatgctgtagccgtaaatcgtgctcagcggggtttttaagtcatggctcagcccggcgatccactcttcccttgtcgcctggattttttctctgtttttcttatcccgcttcagcgtgtcggtcagctgatccatcgattcgaaaatctcggcgaaaaagcggaacggctgttttgttttgccttttttgtttttgctgaccggctgtcctttgcggttcttcggctcttcaagccggccctttgataaattgacgagccatttgatggtatgaaacagcggccagccgaaacggaaagagtaccagatggtcaggatgcagatcataaataccaggattccgatcaagaggaagagggttttcatcacatttctcaaaaatgatttgttaaactcgtgatcggggatgtacacggggttcggcaccgacgcgaccatccatttcgttttatcgagtcttttaaaagaaatttcccgtttgtaattccacggcttggaactgtatttcagcaattcaagctcattgacggtgctccgttcttttttcgtgctgttgatatccccgagcagtctgccgctgtcttcgagaaggtagaccgcccctttttcccgtttaatataatcaaccgtgctctttttatattgagaaagggaagcgagggatggctcctgtgattcgatgtaagtgagaagctgctcactggcggatttccagccgaacagaatcaaataggtctcatcatttatcgtgaccgtccagtaattcagcttgtagttgtcaaaattccggtactggtaaatggataagagatcttttctgctgtaatggctcgggacgtctttcggcactctgtacgcgtagtccgttttttcattatcattaatgatctgcagccagcccttctgctttcggaccgacatctttaaaaactcatcgacatcccatgtgccgtcttcgtttttatcaagccacgcttcaaacgagtccgcggtcgctttggtcagtcccgcattggcttccgcttcgctgaaacgccaatccaaatagaagaaagaagcgacggccaaaacggacatcagcaggatgacaagcagcagctgtccgaaaaagtggagcagaaattttccgcgcattctcatgagcgggttcctttttctccttgatcgggaataaaccgataaccgaggccgcgcaccgttacaatataagacggattgctggggtctttttcaattttttctctgagcttgcggatatgcaccatgacggtgttgttgtcgccgtaagacggatatccccatactttttcatagatctgatcttttgagagcaccacatcagggtgttcacagaaatattgaagcaattgcagaagctgtgcggagcagctgacgggctctcccccgacgatcagctcggcgttttgcggtgaataggaaaaatgactgtatgaatacgtctttaccgccgttttctcttcgcgcttataggttctctttaacgtcgctctgatccgcgccgccaattcgagcggattaaacggctttgttatataatcgtcagctcccaatgcaaatcctgacagcttatccgcatcagaagaacgggcggtcagaaaaaagatcggagcgtcggtatagttccggatttcggtgcatgcttcaaaaccggacatgccttccatcatcacatccagcacgagcagatccgcgttttcatgtttaacaaactcgatcgcttcctcagcgcttccggctgtcttaatgttgtgatagccttctttgacgagaacgcgtttgaccatatcaacgatcgccttctcatcgtctacaattaaaattgacgcattttccaccttggacgttcctttctctttgtttttttcatcatatcattatatggataagatttggtacctttttagtgcggaggtcttgcggggaaacagaaaagaaaaacgagaccggacatctcttctcgtttttctcacgttgtcagagcggaatatccatcattccgccgcttttgtcaggagctttcatttataagatgaagaataaattcccaaaaacccggcacttcctggcataacagcatgtccgctttttcaactattttaatcttcaattcttgttcaagatcttctctttcctggtatgatgtattgctcagttttttttttatcattggcgaaaaacgcgaaatcaaaagttccatttcgtcggtatctgtgttctctttgttgaagtcaaatggcccgttcactgcttattttccccctttttttgctgtccagctgctttctgagattgtcgagcccttttttatgaatattggaaatgttctgccgtgattcacccagcgactcggcaatctccttcatcgtcgctccgtgaagataaatattcgtcagcacgcttttttgtttatcggttaacgtctgaagcgcttcgtataaatcacggttttggacatgctggctcaaatccccctgcttccgcagaaactcttcatacgcgtcttttcccatttcatagggaagcgcttcacctccctccggctgatccaccgtcagcggatagcgcttctgatttttacggatgcgcttgtcaaaatcgatggagaaaatccggatcatagagttcatatatttgatgatccggatttccttataaaactgtttaaaatggtcgtccagtgattttgcatccttctcgtctgaatgttccagcacatttttaaatttctcgtaatgctttgggtcacttaaaaaatgtttaacgatcggatgtttcataatttccttgcattttgaccgtaaaagaacttgatagtccataaaaccgccccctatttaaattaaatgaaagaaagcaaaaaaaagtaaactactcctttccgactaagattccgcactccttatgtcccggttttgccggaacaaaaaaaagaccctcaatcgggatatcaggtttacaagagccgctctttctttcacttatatacatgactgcaggtcaagtcaggaggtggctgacaatggatcaggtttttatagaagaagcggtcagacagatcggcaatctcggctttccggctctgattgccatgtatcttctcacacggtttgagaagaagtttgacgccctgatcgaactgatgacggaactgaaagatcagaaaatgaaaaattaattttcacacgaagttgacttttcatcggaacgcatcacttaacaaagcagaagggaaaacgaaaggcctttcacattctctttctgaaaaaacaaagcttgagaggagacgatttacatgtcaaaagaaaacaactgcaatatcccgcagccgatcagaggagacaaaggggcgaccgtcacgattccgcgcaaccttgaaagagaccgccaaaatccggatatgctgacgccgccggaaacggatcacggcacagtggataatatgaaattctctttctcagatgtgcacaaccggctggaaaagggcggatacgcgcgtgaggtgaccgttcgcgagctgccgatttctgaaaatctggcatctgtcaacatgcgtttaaaaccgggcgccatccgtgagctgcactggcataaagaagcggaatgggcatatatgctgacgggcaaagcgcgggtcacgatcgttgatgaacagggacgcagttttatcgatgacgtgaaggaaggagatctgtggtacttcccgtcaggcctgccgcactccattcaggcgctgaaagaaggctgtgaattcctcttggtttttgatgacggttccttctcagaaaacagcacattccaagtgactgactggcttgcccacacgccgcttgatgtcatcgccaacaactttggggtttcagaaaaagacctcgccggcctgcccgggaaagaaaaatatatctttgaagagccggttcccgggaagctgaaagatgacattgtggaaggcccgaacggtgaagtgccttatccgttcacttaccgcctgctggatgaaggcccgactgctgagacggatggcggcaaagtatatatcgcggattccacaaacttcaaagtgtccaaaacgatcgcttcagcgcttgtcgtggtcgaaccgggcgcaatgagagagctgcactggcatccgaacacgcatgaatggcagtattatatttccggtaaagggcggatgacggtttttgcatcggacggccatgcaagaacatttaactatcaggccggggatgtcggttacgttccgttcgcaatgggccactatgtggagaatttgggagatgagccgctcgtcttcctggaaatcttcaaggatgaccactatgccgatgtgtccctgaaccaatggcttgccatgcttcctgagaaattcgtccagcagcatctggatctgggcaaagactttacggatattctttcgaaagagaaacaccctgtcgtcaaaaagaaatgctgaagatacacaccggcttgcagagttccgtctctgcaagtctcctctgtgtgaaaaggagctgaacagatgatcaatcaaaacgggacgaaaatgttttttcttcatgtgctccggtatgccctggcagccgctgccgtattattcgggtatttcatcgtgatgatggctgtattttcattagccgggacgagctacggatcgatggcgtacgtcctgcttttttccgtgctttttattcttctcggtttatgttttgaaccgcttgagcggctgatgatacatagctttaccttttttgggacgggcaggctgccttttctccttttagccagcaccgttcagctgctgttcctctggatgaccgcgtatacgacggataaactgattgaaaagatttggctgtcaacgacggaggagctgattgtggcgggggtttttttcgttttggataaatgcgtctccggacaaaagcagccccgggcgcaataaaaaaacgcaggccggaatggctctgcgttttttttcatcataccgttgcgttttcatgccggattaaatcgtaggttaagcagaccggtttgttcgtgcgcggatcttttacaatctgtgcgtcaatttggaaaacgtctttcaatatgccgggagtcatgacttcctccgccgttccttccttgatgacgcgcccttttttcagggcgatcatgtaatgggaaaaacgggcggcatggttcagatcatgaatgaccattaaaatggtgcggccctgctccttgtttaatttgtccagcagctgcaaaatttcaagctgatgggcgagatctaaataagtggtcggttcatcaagaagcagcagctccgtttcttgagcgagcgccatggcgatccacacacgctgccgctgcccaccggaaagcgcttcgatcggccggtcgtaaaattcggccatccccgtctcttccagcgcccatttgatcatgtcacggtctttatcactcaaacggcccattccggactgatgcggaaacctgccgtaagaaacaagttcgtacaccgtcagcccgctcggcgcttcaggcgtctgcggaagaattgccatttccttggcgatgtctttcgtggatttttgcatgatcgcctgtccgtttaaatagacggcgccggatttcggtttcatgattcttgacatcgttttgagaaccgtcgattttccgcagccgttcggaccgatcagtgttgtaatttttcctttcgggacggcgatatccaattctttcgctatcaaacggtcgccataaccgacagtaagctgttccgccgataatgagttcatcgcggcagtctccttcctctatttcgttttcatcagcaaatatacaaaatacggcgctccgagcacggaaatcaccaggccgacgggaacttcggacggtgcaagcacatttctcgccagcgtatcggcaagcagaaataaaaatgcgccgattaaagccgaaaccgggataagcgtctggtggcgcggtccggtaagccttctggccaaatgcggcgcaatgagtccgagaaaagcgattccgccggctgccgcaacacatgacgcggtcagggcaacggcgcacatcagcagaacgcgccgctccttttcaacccgggtgccaagccccgccgccagctgatcaccgagctggagcacatttaaatacctggctttatagaggctgaacggtaaaagaaccagcagccacggcaaaatggacagtaccattttccaattggcgttccaaatcgaaccggaaatccatacaagcgcctgcatgaaatcccgcgggtccattttcagctgaaaaatcaagagaagcgcattaaaccccgcattgacgccgatcccgaccaaaacgagccggacaggtgaaacgccttttttccaagccagcacatagatgagcagcgcagccagaaaagcccccgctaaagcgctcaccggaagcagccatgtactggccatgcttaaatcagcagctgatccttggaaaaagaagataaacaaaacgaccgccaaagacgccccggcgttaatcccgagaatgcccggctccgccaagtcattttgagacacgctttgaaaaatcgcgcctgaaaccgcgattccggcgccgaccagcaatgacagcaccatgcgcggcagtctgaattcaaataaaacgagctgatcccgggcatccccttgtccgaaaaagacacgtagcgtatcaagaggcgcaatccggatcacgcccatgtttaagctgataaaaaagacgatgcatatgagcaaaaacgtaacggccatgaccgccagcggttttttcgattttacattcattacagccctctcctttccctgcgcgccaaataaaagaaaaagggaacgccgataagggcggttaaagcgccgaccggtgtttcaaacggcgcattgacgagtcttgcggcaatatcactgaagactaacagaacggcgccgaataccgccgaacagggaatgatccacctgtaatctaccccgactaaaaatcgggtgatatgcggaatcaccaagccgataaaagaaatggctccggcgactgagactgaagcccccgtcaagaggacaacgacaaacattccgattactttcacaagcgatgtgtactgcccgagccctttggccagctcctcacccaagctcagcaccgtcactgagcgcgcaatcagaaatgccagcaaaagtccgataaccccgaccgccaacagcagctgcacgccttcccatttcacggaagcgactcctccggcgtaccagaacttcacatcctgggcgacatcaaaacggatcgcaatcgcgcttgaaagccccgttaagaaatagccgactgccgtaccggccagcgcgagcttcaccggtgtcagaccgccttttgaaaacaggccgatgccaaacacaataagcgctccgattcccgctcccgcgaaggaccacaaaacaagtcccgccgcagacaggcccggaaaaaaagcaaacgccaatgcgatcgcaaatcctgaccccgacgtcacgcccataatggaaggctcagcaagcgggttccgcgtcagcccctgcataatcgccccggacacagctaaaaaagccccgacgagcgcggcggcggcagttctcggcagcctcagatcgcgtatgatttgatgagatgtattttgcggctgaaagtgaaagagagcatcccacaccgtccgcagatgaatatcggcagctccgatggaaacagacagagccgcgccgatcaataataccgcaataccggcacacagcagcacagccgctctgaatgaacgcgccgtccactggatttcactccctgatgccccttgagccgtcattgtctgtttctttttcaatagacccaacactcgttcttcctttctcaaaacaagaatggtaatgataatgattatcaatgacttgtttcagtatagcacttttatcttctcttttaatagacctaatttcatataaaaaaagaaagtttttcttaaaaaagagcgtgcttctctatgaaagcagtgatataatcacactgataatgattctctttatcactaatactcatgaaagaaggaatgtcagatgttccatacatacaagaaaatcggcgcagcgctgattgccatgctgctcatcgccgctttggccgcatgcggcaattcttcagactcgaaaggttcttctgaaaaagaagaaaccatcacgtataaagccgaaaacggcaatattaaaattccgaagcacccgaaacgggtcgtcgtcatggctgacggctactacggcgactttaaacagctcggcatcaatgttgtcggcgcgccgcaaaacgtatttaaaaacccttattacaaagggaaaacaaaaggtgtgacaaacatcggcgacggcacgtccgttgaaaaaatcattgacttaaagccggatttaatcgttgtctggacgacacaaggcgccgatattgaaaaactggaaaaaatcgcgccgaccatcgccattaaatatgacaagctcagcaacattgatcaattcaaagagtttgcgaaaatgacaggcactgaagataaagcagacaaatggctggctgaatgggataagaaaaccgctgccgctaaaacaaaggttcaaaaagcggtcggctcaaaaaccatctccatcatgcagacaaacggaaaagacatctatgtattcggtaaagacttcggccgcggcggaagcatcatttatgacaaactcgggctgaaggccacaaaactgacgcaggaaaaagccattaatcaaggaccgggctacgccagcatttcactcgagaaactgcctgacttcgcgggagactacatctttatggggccatggcaggccggcggtgacgacaaaggcgtgcttgacagctcaatctggaagaacctcgatgccgtcaaacaaaaccatgtctaccgcattgatccgatcggcttctatttctcagacccgatctcacttgaaggccagcttgactacatcacaaaaagcttaacgaagtaatcccgaagccgctgtcacagcggctttttattacgctttacacttgaccgttttttcagcggacgcactgaccatttaaccgcattcgagaccattcattatatacacgccgtcaaaacgtaacccgccgccgcaaataaaaaagacatctcacagacgtgagatgtctttttgtcataccgattgtctgttgtttgcaaatttctttgagacgaaaggatataacagcaaaccgacgaagaacagcccgataccgagaataaaggtcgttaaatcggccgttccggtaataatgacataaaaagaataaatgcaggcaaggatggcgatgataccgtctcttactcttgaaccctttatctcgtcatacgtttcacccgtaaaaatgagcttcaggctgtaaaacgctgacacgagatacggaatcagataagcgagcgtcgccgccgtcgttaaaaacgtaaacgcgtcactgatcgtccgggaaataaccgaaaagataaagatctgtgacatcacgttcgttacgattaacgacacaaccgggcttccctgtttattcgtttttgcaaaagcagccggaaagtctcctgatttcgccgcttgatacggaacttcagagccgagaagaatccagccgagcatcgttccgaacagacacaaaatcgccagaatcgccatgatgacgcttcccgcattgccgacgatcgcgtacaatacgtcaacaaacggtttttccgagccgacaagcttaccatgcggaagcacgcccatcgtaatcaatgtcacgatgatatagatgctgagcgcgatcaataatccggtaatggtggcgcgtttcacatcgcgctgcgaacgggcgcgcccggataaaatgactgccgattcaattccgacgaacgcccataatgttgaaatcgccgcattgtggatctgtccgccgattccctcaactgtgtgaggacctgtttgaaccggaaaataaaaatgatcgaaaaacgacgtttgaaacacaaataaacctgcaatgataaagaaaataaatcctaatacttttgaaaacgtcgtgacaaaatttaatttactcgcaccgttaatgctggtgacgagaatcgtgtgagtgccccataataaaaccgtacatacggcaaacgtcagcagctggccgagcgtaacagcctgaccgccgatcgaaaacatttcacgcttatccgttaaaatcgggaaaaatgatgttaaatatccggcaaggctcgtgatgatcgccacgttgctgatccagctcgccacccagtagccccagaccatcgtgaagcccgctgcattcccttttttccgatcgctgaacagcgcacgcgcatagctttgcggccccgccgtcagctcaggcttgcggatggataagtggccgaagaccagcgcgatcattaacacaccggctcccgttaaaagccatgccgatgtggcgccgaacgggctcgcgatttttgcgagcgtactcggaagcgaaaagatgcccgagcctaccatatttcctacgacaaacgccgttaataaccaaaaaccccattttttcgtctgttccattcctgtacctcctggttgttcattcgtacggaccagaccccgagatcatatttacacgcaaaaaaagcctgaacaaaagtccatgcttaaagaaacacacacacccttgatctccggatagccctccgcgaaaaagcacgcggcagtcctgcacttattcagatacagtcccagcataaagaaggatcggctttctttacacttcggcgctgatgcctttaacacatgttttgcggccccctatcagcctggcatgtgcgactcatcatcaagcgcaacctctacctcaccgagaaagagtgaggatttttatcattcaattctactcagaggttatcagagataaaaagatctgtcaaagggaaaaattagatggaaaacggatagagcgttcgccctacccgtcttatatggtcagcggttgttttttttcttttgaacagcttcttgaagcggatcgtctttcagagctgcaccggcgtcttcaagcgcgccttgaatgacatttttgtttttatcgctgttttttcctttttctttgttaaagaaagccatctgtatcacctctttatcaaatataggtacacctataatgtgtctttttccgcggcagaatatgcggaatccgcgtctccttccttttggcggaacaggtaaagtttgttgatcaaacatgcattctcttgatatatttgtaattcaggggattttggcaaaaataaaaaggagaagcgaaaaatgacaggaaaaacacacatcatgggaggcatcgcttcttgttccgcaattgcgtattattacgggtatgatccggtccttatgacctcagcgggtgccctcggggcgctgattcccgacatatgccatacgaaaagcaaaatcggcaggacgctgcccgttctgtccaaaatcgtaagcacggtgttcggccacagaacgtttacacacagcctgctgtttatgcttattatgtttttcattacggcaacctatattccgaatccgagcatttccgccggactgatgatcggaatggcgagccatcttgtgcttgacgcatggaccgtcaacggcattaaactgctgtttccgtccgccatccgcttccgtcttcccctttatatgagaacggggagtttttcggagcagcttgtgctggccggcttaacgattgtatcctgctattatttatacgaactggttcacggccgcatctcttaaacaaaaagcatctttcgcttttagggtgaggagtcatacatatgaagaaaacctttttcagcaatcatcggtttttatgcctgtccatcctgttcatgtggatgaaaacctatgccgtttataagctcggttttgatctgcagaacaattcggttcttgaggaatgtctgcttctcattaatccgctgagcttcattgtgccgctgttcggcatcgccctgctgctgacagaaaaaaaacagcggatctttctgctttcggcaaatgtgatgctgacgggaattttaatcgcgaatacggtgttttacgggttttatattgattttatcaccataccggttttgtttcaggcgagcaatatgggtgatatgggaagcagcgtccaagagctgtttcacccgctttatatcgctttatttttggatattgcggttttgttttatcttggtaaaaggcataaagctggtaaaggtaaagccagcacccgtaccgttaaagcgtatgcgtgggcatcagccggcctcatgctgtgcaaccttgcgctgtctgaggctgagcagccgaagctgttcaagcacccttttgatcgtgaagcgctcgtaaaaggaatcggcctgttccactttcatttgtatgacaccatttcgcagacgctgaatgcaggggctaaagcgtttgccgacgaagacagccttgcggcggtcgcgaattacactcaagccgactacagcaggccgtccgaatcaaagttcgggctcgcaaaggggcgcaatgtgatttttgttacgctcgaatcaacacagcgttttgtaatggatgagcgggtcaacgggcgggagattaccccgtttttaaataaactgcggaaaaaaagttatgacttcactcatttttatcagcagactgaacagggaaaaacctcagattcagaattcattactgcgaattcgctgtatccgtcttcaagcggcgccgtttttttcacaaaaagcggccaccggttcaatacgatgtaccatatgttaaaagaccgtcaatactattcagccgttctgcatgccaatcataaggccttttggaaccgggatgagatgtacggggcattcggaatcgaccgttttttcgacgcggatgaatttaaggtgacacaggaaaattcaacaggctggggcctgaaggataaggaatttctcgaacagtcagcggaaaaattaaagaagcttccgcagccgttttacgcgagcctgctgactttgaccaaccattttccttttgaaattgataaacaggatcagctcattgaagaaccggacacaagcagcgagttattaaaccgctacgtgacgacggtccgctatgaagatgaggccctgaaacactttttcaagacgctgaaaaaagaaggactgtatgacaacgcgatgatcgtcctgatgggagatcattacggtatatccgaagcccataatcaaggacttgccgaattcttagggaaagaggaaatcactccgtttgatacggttcagcttcagcgcgtgccgtttatcattcatattcccggggtgaccgaccgtgcgccggaaacgattgcttcggccgcgggacaggttgatgtaagaccgacgctgcttcacctgctcggcattgaaacgaaaggcagcattcagttcggcaatgatctgttttccggagagcggaccccgtttgcggtgctgagaaacggcagctttatcacggatgatcatatttatacgaaaaatacgtgttacagccgtaaaacgggtgaaccgctttctgacatgagcgcgtgcagcgatgagaaagaaaaagcggaacaagagctgatgctttccgataaaatattaaacggcgacctgctgcggttttataagcaataaaaaaatccctccgttatatggagggatttttcatgtttcatatataagccgtccggtcattttcgtatcatatccggataattgagaaagctgagacttgaattcctcagaattaagaatgtcctgcacgctttgaacaagctcccggttttgttttaagacgaccacatcgtactgctcactgatcaccgggataaagtccgtgcccgccatatgcgccgcatgctgcgacccgactccgatatccgcctttccgcttgatacttgtgaagccgctgacagatgatccgtgacaatgtcatgatagccggcgacatcagacggcgtaatgccgaaagatctgagctgttcatccagcagcaccctcgcgcctgatcctttttcgcgattgacgatgcggacatcttttcggctcatgtcctgaaaaccctgaatgttcagcggattgccctttttcacatataatccggcttgccgcagcacgacatgaaaaagcgcaaacggctcccctgaaagaatgcgcttcacatacgggatgttatactgccccgtctccccatcgtacaaatgcagactgacgatgtcacaagctccgcggtacatctcgatcaggctgttcaaactgccgctgtacttgcggagcggagccgcctgtatagtttgttccagctgtttgctgaggaggtccatcgacacatcctgcccgctaatgataacggactgccttttttccggctcccgcccgcgggacgggtcagcagcttctgatacggatggcttttttgacattctcatgtttgctttatattgttttaagtcctcttcatcgaccctcatctgtcttccgaccctgtacgccggaatgagtcctttttttatcaaatcatatactgtcagtttggagaccttcaaaaggcccgcaacttcttctattgtataggaagtggcttctgtcatattatcacgctccgtttttattataactgttcagatattgaaaaaaaaccgcaccatcacgttcaattgcgttataattagtttgatctaatgatatttagctataaggggtgcacaatgttgaaaaagaaagcgacactactcacaactgcggctatggccgttttcctggcaactgcgggctgctcatccggacaatcgtccaaaggcggacaaaacgaaaaagtcacgctgaccgtttctgcggcagccagcgctcaggatgcacttgaagaaatccagaccaactacgaaaaatcacattcaaacgtaaccattcaagacaacttcggatcatcaggcacattgcaaaaacaaatttcacaaggcgcgggagctgatttattcttctcggcagccgaagataaattcgaaaagctcgttcatgacggagatatcgacaaaaaggacagcacggatcttttgaaaaatgatctcgtcatgatcgtacctgagaaaaacagcgcacacctgacacatctgaatgacctgaaaaaagacagcgcggaaaaaatcgcgctcggcacgcctgaatccgttccggccggacaatacgccaaacagtcattgacggcattatccctgtgggacaaggtaaaagataaagtcgtctatgcaaaagacgttcgccaggtgctttcttatgttgaaaccggaaatgtcgatgccgggcttgtctataaaacagacgcgctgatttcgaaaaaggtgaaaatcaccgatgaagcgccggcgaaaacgcacgatcagatcgtttatccgctcggcatcgtcaaggatacaaagcaccgtaaagaagcagaagcgttttatcagtatctgcagtcagataaagcgatgaaagtgtttaagaaatatggatttactgccaagtaacattacggcttcggagtttttcactcccgtcgtactgtcgtttcaggtggctttgacatcaggcatcgccgtcatcattctcgggacgcttgccggcgcctggatggcgaaagcgcgatttcccggaaaaacggctgtggagaccctgtttatgctcccgcttgttcttccgcctaccgttgtcggcttcattctcattattattttcgggaaacacagctttatcggccgggcgattgagcggatttttcaccagcccgtcattttcacgtggtcggccgcggtgatcgcttcggccattgttgccttcccgcttatgtatcagtccgctaaaacgggcttcgccgcggttgatgctgacatcgagggagcggcgaaagtagacggagccggcaggtggcaggtgttcacccgtatttccgtcccgcttgcctttccctccctcttgaccggaagcattctcagtattgcacgtgcgctaggtgaattcggggcgactttaatgtttgcgggaaatattcccggtgtcacccaaacgctgccgacagcgatttacgtcgcgatggactccggcaatgaaacactcgcctgggtgtgggtgatctgtattgtaatcatttctttcctgatgctgtttttcatccaattgaaaaaacccgcttgaccgatccgccttccgcgcacctttcgccgggaggctttttgatttaaaatcggatggtatataatgaaacaaaaaacacacaaagggtgcggccatgaagattaatgtcattatcgcggatgataattctttcatcagagaaggaatgaaaatcattttgcatacatatgaggaatttactgtatcggcaacgttggaaaatggcctggaggcggcagagtattgtaaacacaatcccgtcgatatcgccttgctggacgtccgcatgccggtgatgaacggcgtcgaagccgcaaaacggatcgctgaggaaacggatacgaagcctatgatcctgacgacatttgacgacgatgagtatattttagaagcgattaaaaacggcgcgaaaggatatttattaaaaaataccgaaccggaacggatacgcgatgcgatcaaaagcgttttcaacgggcacagcattcttcaggacaccgtgctggataaaataaaagacagccttttccggccggcggaagcagcgcatcagattgatgaaagccagtttactgaaagagagctcagtatcatgtcgcttattgcgaaaggactgtcgaacagggaaatttcaaaacagcttttcatttctgaagggacgacggccaattatatttcatctattttagggaaaacagggcttgagcacagaacgcagatcgcgatttattatatcaccgggaaggtggataacgggcgttgaacggtatggatttttggatgctgatgagcagactgatcgccattttttatacggcttttttgttcgtatcggcagaccgcccttacacgccgtacgccgtcttgtttctgctcgcttatctgtctttgggcattgcggtctgcatgatcaggccgcccgcttggaggcgcgggatcaccctgctttcgcttgcattgactgcctggctttccgccttaggccatccggcgtttctatttcttttgccgcccgccatttttgccgttcttgccgaatatccggttcaccgctatgtgttctgcctgctcgtgtttttgccgtttttatttatcccgtacggcgaccttccgacttatatcgtcatgaccttgttctgcttggcgatattcgttttggccgcccggtccagcgaccggctgaaaaaatatgaagagcagtcagacaacatgcgctcaagcattgaaaaactgacgaaacagctgcacagcagcacggaatatatcaaacaatcggagtataccggcaaactcgaagaaagaaacagattgtcccaagccatccatgacaaaatcggccattccatgacaggcgcgctcattcagatggaagcggcgaagcggatgctcggctcccatccggacaaagcggctgaactgctccaaaacgccattaccatttccaaagagggcatagaggatatccgcattacgcttaaaaatatgaaaccgcccgctgaacaaatgggcattcacagattaagaacgtttattgatgaattttcggccaaaaacgggatgccggttccgtttacgcatcaaggcgatttggacagactgacgcaaatgcattggagagtcattcaggaaaacgtaaccgaagccttgaccaatgcaatgaaatacgccgatgccacacagatcttcattgatatccatgtgctgaacaaagccgtgaaagcggaagtgaaagataacggaaacggcgccgtccgctttaaaaaaggcctcggcatgctcggtatggaagaacgggcggccgttttgcacggaaccgttatttttgacggcacggccggtttttccgtcacgacattgcttccggttgaataagtgaatgttttcatgtgaaaaatatgaagattctcatgtcaaaggaatgaacagctgcactaacggccgttcattcttttttttataataagagcatcataagacatagaggtggaaacatgaacattttggagctcaaacagctgagtaagaaattcggtgattatgccgccgttgaccagatgtcgcttgccgtaaaagaaggtgagattttcgggtttctcggcgcaaacggagccggaaaaagcacgacgatcaatatgatctcaggccttttaaaaccttcaggcggagacattctgtttctcggaaaagatattttcaaatatagcaaagcaacgaaaatgaatatcggcatcgtccctcaggacctcgcgatttacgaagaattaaacgcctatgaaaatgtgaagttcttcgccgggctgtacggcctgagaggggcggctctgaaagaacgggtcgaggaagccctgacattcgtcggcttgagcgataaacacaaatatttgccgaagcatttttccggcggaatgaagcgcaggctcaatattgcgtgcgctcttgcccaccggccgaaactgatcatcatggatgaaccgacggtcggtattgacccgcaatcaagaaattatattctgcaatcagtgaaaaagctgaatgaaatgggctgcacgatcatctacacgagccactacatggaggaagtggaagaaatatgcacgcgcatcgccatcatcgaccacggaaaagtcatcgcagaaggcacaaaagaacagctgacctccatcattaccgacacgaaggacgtcgtgattgagctgtcatccggaaacggcatcagcctcggcgatattcaggagctgcccggcgtcagagccgccacactggaagaaaacagcgtgaaaatcagctctgacacaggggtcaacaatttaaaccgcctgatccggtacttcatggacaaaggaattgaaatccgctccttgcaggaacaggcccctgacttagaaacggtatttctcacgctgacaggcagaagcctgcgcgactgacctcactgaaaggaggattgcaaatgaatattctgcacatcgccgggaaagaaatcaaaatcagtttccgcgacagacggacttttattttcatgcttgcttttccgatcgtcttcatgctgattttcactgcagcattatcaaacgcctttgattcagaggtgacggtcggaaacatcaaggtcgtatatacggaccagtcaaacggccctctttctcatgattttactaagtttatgaaagccgcaaaaaaagagcatgtctattttcaaaaagcggacacggaggcaaaaggcaaaaacgaggttcgagaaaatcaggcggatgctttcgtcactgtaaaaaacaccggttttcaagtctatacaaatgaccggagcggcataaacggcacgatcgtccaaggcatgctgaccgcttttaccaatcaatacaaagcaggcgccgccgcttacaaggcgcataaggcaccttccgccggacaaatcaaaagcgattataagaagcagacgtctttacacaaagcgaaagaaccgaaagcgaaagatttttacgcgatatccatgacgacgatgatcgggctgtacgcctcgatttttgcaagcaccttattccgcggggaaagaatacggcacaccgcggatcgcctgatcgccgccccgctccggaaaagcgatatctttctcggaaagatgctcggcattttggctgtgaatgttctgacgattcttgccgttgtcgccttcagcaaatttatcttgaaagcgaattggggcagccacatgggacttgtgcttttgattctcgtttctgaaattcttttggccgtcagcttcgggctcagcctgagctatttgaccagaaaacccgaaagcgccagattaatcaccgtcatcatcgttcaggtgatgtccattatcggcggcgcctattacaaatatgaaggcggaggaatttccgccctgtcgcccttatcctggatcaataaggcgattaacaacatcatttacgcaaatgatgtatcagcggcatggcctgcactcggtttaaatacagctttagcggcactctttttgctgatcgccgcatttacgtttcaaagacgggagggactgtaatatgaaaaacttctggtggctgtttgcacacactctcaaagggattacaaaaagcaaaaaacagctcattctttatatcggggctccgctgatcggcgtcttcctctccttcatgaccaatgccaacggcggagccgaaacgctcaatatcggcattctcaatcaggacggcggagaagtggcgcaggatacggccgcgtttttaaaaggactggatcatgtgaagatttcggaggaaacagctgcgtccgcctcatcaaagatcgcttcaggaaaaatggaggcgctcattacgtttgaaaaaggcttctcccaaagcgtaaaagccgggaaaccgtctcacatcggcatgacctcgctgaaaggcgcccaggtcaccggatatgtcagctcttatttgtacaattatatgaacagcatcgcctcaatcggcaaatcctccggcggagacgcaaaggcctttcaggcgatgtacgccgatttcaagcattctcccattcaaacggagtccgctgttttacaagatacatcgaaccataaagaaatgacttactcagtcatcgggtatctcattatcattatgctctattccgcaggcaacctgacggaactaatgattaaagagagagaaaacaggacatactacaggcttctgtcaacgccgatcacatcaaagcagtatgtattggcgaacgcggcggtgaatatcattatcatggccgtccaaattctattcgccgttctctttatgggcgccgcttttcatattcatccgtcattcccgctgtggcagctgttcgtcctgatgatgctgtttgcattaagcgcgatcggggtcgcctttattgccgtcggtttttccaatagcagcgcttcggcatcggcgcttttgaatttgatcgtcgtgccgacatgcttgctggccggctgcttctttccgggcaatattatgccgaaaacggtgcagacaatcgccgaatttctgcctcagcgctgggtgctcgatacagtggatcaattgcagcaaggccgcacgttccaaagcctgatgctgaacatcatcattttgggagccttcgccgccgccctgttattaatagccgcatacaggttcagcgtaaaacgtcagacacagacatttatgtaaagaaaaacagccccgtaaagggctgttttttcttagaacagaagctcgtccggattcgggccgacacgttcgtctttgttcaatgcgctgatcttttccatttcttcctgtgacagttcgaaatcaaaaatatcggcattttctatgatgcggtgctctttaatcgatttcggaatggtaacgacttcgttctgaagatcccagcgcaaaatcacttgagcaaccgatttgttatgtttttccgcaatttgtgacagcacttcgttatcgagaagctgtccctgcatcaatggagaccatgcttccacttgaatgccctgcgctttgcagaaatctcttacttctttttgagtcaggcgcgggtggaattcaatctggttgaccatcggcttgatttcagcatctttcagcagttcttctaaatgatgcacttggaagttgctgacgccgatggcgcggattttgccgtctttgtacagcttttcaagagcgcgccatgtgtctttatatttatccttgcccggccagtgaatcaggtacagatcgaggtaatcgaggccgaggcgctcaaggcttttctcaaacgcgtcaagtgtcgtttcgtatccttgatcttcattccacacttttgacgtgatgaacagttcttctcttgcaacgcccgcagctctgatgccttcgccgacaccctcttcatttttataaatagccgccgtatcaatgctgcggtagccgtttctgattgccgcttcgacggagtccgccgctacgcttccgttttccaccttgaagacgccaaggccgaaccacggcatttcaacgccattatgaagctttacagtatcttttaagctttttgccacgttgaaccatcctttctagtcattatgtaaacggttattattatctcacatttccgccgtaagaaaccaattatacgctcatcgtcgtcacaaaaaccatctttagtgccaaagcaccacttccgttattattttcctatttttcaaaaattccggttagccgggtaactgtccgggtaaatcgctactgtagccaccacacaattgaaggaggaaatcatatgaaacgtatgcgtatcccgatgtccgttgcccttggcgccgctttgtctctgactcctctgtcctttgtatccgcaaaagaaaccccggtccctcaaaacatggcacagcaatcatcagatgtctcagcaaaagatgtcggattaaacattgacgttgacctgctcggcatcggcaattcgattgctgacgcgattaagtcggcgcaaaaccgtgacggcttcgtcaaaaacttaatggaatcttcattctacgcttccggacaaaaatataacgtcatggtgtttaatttaagccaggaatatgaagatcattttaacggcgttcagttttacggttccgccgtttatgacggcatcacgtacggcatttgggtgtttgaagacggaagcttcaccaataaaggtgatggcggctggatcaactgggccttcagaggctggtttgaccgcgacggcaattcagttgaattccatcggccgtaatatgcaaaaaaagccggcgccttgtgcgccggactttttttattctcctccgtcaagcattgccgcttccacatcattaatgtactggcgaagctcatgtgacatgtcccgggaaatttcccgctcttcgaataatgtttggatttcgttgcggatggcctgcacggcccgcagtttgatttcgagtttttgattttcaaaacggcggctcggactctgttcgtgatacgagtgccccagcctgaaaatcaagtgattgtaaaaggaaatgacggcaagcgtcacatctttattttcttcggtcatgtgttttttcaggctttcaatggccgcttttgccgttttaacccttgtggcgcggatgaggccttcttcatttaaaatcgtcatttccggctttttttgttcaccgaaaaagatccagtacatcaggcgtttcagctttttcttagataagccgactttaaacggattcgtatacagcacttccagttcatccaaccgttcctgaaggctgtcagccgtttcttccggtatgtcgcctcgctcaatcagccgcagcaattcttcctgttcagcctgtatcccttgggcgcggactttccgctcatcttttttcgtgcggtttttgacggtgaactgctgaaatctgagatttttcattttctcattgtattcggcaatgaccgcaaaagaagccgttttgtttgtctcattcatattttctttaatggcggttaaggcagcttttatcagcttccgtctcgctgtcagcaatttgactttcttctctttcacattatcttcgggcttatctgtcaaaatcggcagtacgattgtcgccagcaccaatgtgcacataataacacccgcggctaaaaagagaatcaaattccgttcaggaaacggtgagccgtcagagagcacgtaaggaatggaaaaggaacccgcaagcgtgaccgctcccctgacgcctgaaaccgaaatcagcagggtcgagcgcaggccgggtttataaatgctctgatccttgttaaaaaaccacttgccgttccaaaaaaacagcacccacaaaaacctgagaatcattaacgtcagcgtaatgacgataatgtacccgatgaccatcatattgttaaacgcggtatcattaaatatgacagaaaccacatccggtatttgcgcccctaaaataacgaaaacaagaccgttcagaatgaacaaaataatattccacgtacttgaagagacgatttgcagtttgaccatcgttgattcaagacggtcctgctccaccgcatgcgtgatgccgccggccacaacagctaaaatgccggaaacgccgatttcttcagccgcgagatagatgacgaacggcgtcagaatttgaatcagcatatgcatcgtgacatcctgcatgccgaggcggcgcaaaaacagccggaaacggataatcaaaaaagaaatgacgacaccgctgagtaaaccgccggctgaaatcagaacgaaactgaaggcggcctgcgccagcgaaaatgcgcccgtcacggcagccgcaatcgcaaatttaaaagcgaccaggccggatgcgtcattcatcagtccttctccttcaaggagacgcagaatgccttttggcatcttcactcgccctgacagcgcgctgaccgcgacaacgtcagtcggtgacaatatcgccgccagcccgaacgcggcagccagcgggatgctcggaatcatccaatgaatcgtgtaaccgccgacaatcaccgtggcaaacacgagcccgagcgcaagcagcaaaatcggcgctcttaaattccaaagttccgcacgcggcgtccgttttccatcgttaaaaagcagcggagcgataaacaaaacaaaaaacaattcagtattcagttcaaaatgaagcccctgcggaaatgacgccgcaatgataccgagcgccacctgaatcagaggcactgggataaaggggacaaaccgatttacgatatttgagatcgcgatgatggttaaaagtacgagtacgactaaaaatatgtccaaagcatgacctccttcatctgctgcatcatatcattattgcctgttctctgcctttgccaaaggccggagccgatgatcgggcagattcaatatattttccgcacgcaaccattcttcttttattttacccgtttttatttaaaatttctcataacgtgctcacggcgaactttttttgccttcggctacattttttccggaaaaagaaaaagcctgttttctctgaaaacaggctttttcgcaagctgcgtcatctgtttcatgacgcggtgcagcgtttatgctgcttagtaaaggatagagaacgcaccgtcagtgtgtctctatccttggttttaagtgctcatcttattcgtgaaaattcgtgccgtctgtcgtcgctttaatgatgccggcgcggataacgaaatcgccgaagtgttcgccttcctcacgctctttcgcgtagcgcgggagaatggtgcgaagctcattcagaatttcctcttcaccgatattttcccggtacattttgctcaaacggctgccgtcaaacgccgctcctaaatacatattatattttccgggcgcctttccgataaatccgatttcgccgagcgcatggcgggcgcagccattcgggcacccggtcatacggatggtgatttcttcatcccgcagcccgttttcgtcaacaatgtcttcaatcttatcaatcaatttcggcagatagcgctcggcttcggccatggcgagcccgcatgtcggaagcgcgacgcaagccattgaactgcggcggagggcggaatgctgccggccgtctgtcagaccgtattgttcgattaatgcgctgatttgtttctttttctggctcgagacattaccgataatcaggttttgattagaggtgagacggaaatctcccgtatggactttggcgatttcacgtaatcccgtcatcagcttataattctcatagtccgtgacgcggccgccttcgataaacatcgtaaagtgccatttaccttttacacccttcacccatccgtaacggtcgccgttatggtcaaaatgataaggtttcgcttcatcaagctgccagccgaggcggttttccagctcggcttttacgttttccagcccgagacggtcaacagtgtacttgaatctggcattctttctgacggaacggtttccgtaatcgcgctgaatcgtaatggttttttccgctacatcatacagctgctccggtttgcagaagccgatgacttttgaaagctgcggataagtggccgtatcgccgtgcgtcattcccataccgccgccgattgcaacgttgaatccgataagacggccttcctccacgatggcaatgaagccgagatcttgagaaaagacatcgatatcattggacggaggcacggcgattccgattttgaatttccgcggcaggtacagcggcccgtacatcggttccgtttccgtgtcaggagtgcccgctacacgttcctcatcaagccagatttcatgataggctctcgtgcgcggaagaaggtcatcgctcaatttcttcgaccattcgtatacttccgcatgaatttcagactggtgcggatttgaagcgcacatgacgtttcggttgacatctccgcaggccgcaatggtatcaagcagcgccgcattgattttctgaatcgtttttttcatgttccattttaaaattccgtgcatttggaacgtttcacgcgttgtcagcttcaatgtattgtttccgtatttttgcgccagttcatccatgacaagccattgttccggagttgacacgccgcctggcatccgaacgcgcagcatgaactgataagccggttcaagcttttgtttttgacgttcattacggagatcgcggtcatcctgcaagtagcttccgtgatgcttcatcagccggttgtcatcgtccgggatgccggctgaaatccggtcgagcatgacttctttcaatgtgccgcgcaaataatcacttttttctttaatttcctcaacatcacttggagggccttccggcgcttttaaaatgttgttcaccatgctgaatatgctcctttcaaaccaaaatcaatatacgtcacgctgatagcgttttttctgctgcatgtctgccaggaagctttccgctttttcacggctcatgccgccttcttcctgaatgatatcgagaagcgcctggtgcacgtcatgcgccatatgctgttcatcaccgcagatgtatacggcggctccctgctgcagccattcataaagctctttgctttgttctttcatgcggtgctgcacatatactttttcctccgaatcccgggaaaaagcgacgtccatttttgtgagaacaccgttttgcagccatttttgccattccgtctggtacagaaaatcagtgacaaagtgctgatccccgaaaaacagccatgttttcccttcagctccggtttcttcacgctcctgcataaaggaacggaacggcgcgatgcctgtccccggcccgaccataatgaccggtgtatccggattgtccggcagcttgaagttttggttgtgctgaatgtaaatcggaagcgtatctcccggctggagtctttccgcacacagaatgctgcagacgccttttcgttctctgccgtgcgcgtcatatctgaccgctccgattgtcagatgcacctcttccggattcgcttctaaactgcttgcgatcgaatagagccgggccggcattttacgcaggatggaaagaaagtcttccgctgtcgcttcccacggcccgaaatcccggacgagatcaagcagatcacggccgttgatgtacgctttcagctgctcttcgtttccttcggccaaaagttcactcagcttttggtcagccgtaaactgtgcggccttttgcaggaacggttttgttaagacggttatttcaaaatgagaagtaagcgcatctttcagcgggaggcgctctccttgtttattcaccgccacttcctgttttgggtcccatttcagctcattgatcagctcatcaacgagcgccggatcattttccggatagatgccgaggctgtctccgggctgatacgcgaggcccgacccttcaagcgaaagctcgagatggcgtgtttctttattcgaaccgcgtccgttcagattgatgttctcaagaacctccgcccgaaacgggttcgttctggaataaacggattcaccgagagccggcgtctcggcaggcgcttcggctgtttgatttcccgctccttcgttcaaaccgccgatgaccgcgtcaagccattcagaaaacggctcatcataatcaagatcgcaatcaacccgcggcgcaagctgggtgccgccgagctcttgaagacgctcgtcaaactctttgccggtctggcagaaaaattcatacgagctgtccccgagcgccaaaacggagtaacggagcgcttcaagcttcggcgcgcgtctgccgtgaagaaattcatgaaaggccagcgcgttatccggcggatcgccttctccgtgcgtgctcaccacgatcaataaattgtttacttttttcagattattcagcttaaaatcgttcatcgatgcgacggtgacctggaatccccgttcctcaagcgtctttaccgtctgtttcgcaagaccttccgcatttcccgtttgcgatccgtataatacggtcacttctttcgagactgccgggctttctgcaggagccggagcagcgggtgcggctgtttcaccggattcggaccgggccgcagccaaataaccgctcagccagattttctgtgattctgtcaaggtcggcagaaggcggttaaggagctctgcctgctcctgattaaacggactgttcatgacctgaagttgcaacgatatccacctcacaaggaattaaacgtaacgtacgttatttctataggaattgtcaaaataatattctaattgaaactttaccgaaagtttgtatgtaagtaaaatatataatcatgatgacaatgattaagattcctaatgataaaaagccctttgcacttggcaaagggcttacacgaataagccggcgggcacttcttttataaaaggagagggttctcccggagacaaaacggtcagatgatgcatcgcccgcgtacaggccgtatataacagcttacggtcatgttcgcttttgtactggacagcagaggcgtcagcggcaatgacggcgtcaaactcaatgccttttgccaaataaacgggaatgacgcatacccctttttgaaaaggctggttttctttattgatcaagcggacaccgctctcggcgctgactgcctgaaacacttttttggcttccgcggccgttttgcagatgacggcgaccgtctcccagcctttttgtctgagctcccggattgtatccgccaattgttcctgccgcgcattttctgtatccgtccgcaaaacacgcggtttttccccgttccggttaaaaggctcaatgtcatcgccgtcagccagcagcgctttcgtaaattcaacaatctgccgcgtcgatctgtaagtccgcttcaggctgacatacttttctgcaccattgcgaaagcagccggcgagggaagaagggcccgtaatggtgtgggcataaatcgactggctgacatcaccgagcaccgtcatctttgccgccgggaagatgctttgaatatacgtgagctgaaacggggaataatcctgagcttcatcaatgaagacgtgcttcatttgtgtgttttttgtttttccttctaacagatcctgcaaatacagatacggagcggcatcttcatacggaagtgaccgttctgcaaatgcgtttctggtcaaagcgccgatgctctcccaatgatcgggcttttcatcagctccccaatctgaaaacagccggagatacatccgttttatatcgagaaagccgagccgtctgacggcctgcttaatcggtttaaaggctttgccgacaataatggcgccaagcagccgctgttcgcgctgatggtcgtcaaatgcaggttcatcatctgccgcctgcttcttgagtgtttgataaacctcagcatagtcttccttatcaagcagctcactctcctgcaagacccattccttcttacgctcctttttttcgagagcgctgatttccgcgagaagccattccgccgtcagctccgctctgttcggaatcggcagctgctgatcaagcgaataaaaataggcttcaatccgctcttttgaaatcaggatgtctccccggaagctgatctgtttacacatcaggccggagaccgaaagcgatccggcataacggtcaatcatggcctggaaagctggtgacgctttgtaagcaatggctgcgagccttacgaaaagtacgtcctgattttgttcagtcaggcaatattcaagctgctcgtacgggctttcacaatcaaactttcgtccgagccggcggaggatatattcctgaaaggtggcctgctccatattctcttctcccaattccggcaatacggcggaaacataactgttgaacaaaatgttcggggaaaacaatacaatctgacgggcatcaagcaccccgcgaccgcggtacagcaagtaagcggcccgctgaagcgccgcggatgtttttccgcttccggcggctccctgaacgatgagatatttgcttttttcatcccggatgatttcgttctgttctttttggatggttgacacgatgtttttcatatgctgtccggaatgcccgctcagcacctcttgcagcatttcgtcaccaatcgtcatatccgtgttaaacatcgctttaagcgtcccgtttttaatgataaactgccgcttcagtgtgatgtctccttctatcgtttcttcgggaacttcatagcgggcttttcccggggaatattgatagtaaagagatgagatgggcgcgcgccaatcataaatgagaaattgctcgttgttttcatccatcaaagaagtcagcccgatataaatccgctcggaagaggactcccctttttccgtaaaatcgacacggccgaagtaaggagaggttttcagcttttggattttttgaagctgccggtattgaagccgatgcgtccgttcacgttctgaaagcatttccgcctgctgtttaatgcttgaaaatgtctcagccgcttcatgggcgtcatccatattcacggtgacatcatcccaaaacgtttttctcagcccgacaatatcctgcttcaatccgcccgatgaggcttcaagatgagtttgtttctgttccagttccttcatgacaaaattgattctttcctgctcttctttccactctttatcacgttttgccatcagcggcacctccgacatcaagctgacaaatccggctttcatcatacaaacatatatgcaacatattattcagcattatggtcaaataccctttttcttatcatatcgggcgtctttttttatcagaagccgttatgcaaaaaaaccgatttcgtttgtgaaatcggttttttactgatctatatgataggaacgattcggcaggcgccacctgaacacataactgcagatgcggcatgccacaagcacaagaaacagcacatacaaaccggcggcatccccggcccagccgaggcccacgattaaccctccgagcgcggcccagaccgcgtaaatttccgccttgagcacaagcggcttcctgcccgcgagcaaatcccgtatgatgccgcccccgctgccggtgaggaccgctgccgcaatcaccgcactgagcggatggcccattttcacggcatataaagcgccttggatggcaaacgccgaaagcccgatggcatcggataggttgccccatttactccaatgccttaacagcagcttcggaaacaaaaagacaatcgtaactgatgcgagagcgatttgaaaaaacgcgccttgctcccacaaggcggagaccggaacaccgatcagcagatttcggatcgctcctccgccgaacgccgttacaatccccaagatatacacgcctaaaatatcatactcctcttccatcgcaacaatcgctccgctgaccgcaaacgcaatgatgccgattacactaagcagctcccaggccattccatatgctcctttttatttgttaaattttctgacgaccattagattttataatcgctttctcttaaaatcaaccttatttttgaaagattctgattcctaatccgggacaacctcactcgcaacggctgggagcaagaacatttacctattttatactattttgggaggtttattggaagtttcattgaatactttctctaagaaaaagggggttatgagatgaaaatcagttcacttgtttttcctgttttattggccgccggattaattcccggcctgccgtcagccgaaagccatacgcattcgcacactcatgcggagccggcgaaaacggtgtatacggacccgcttccgaaagccgatcattttaaagatctgaagggcccggtccaagtcgaacagacggttgacacaaaaattctggatgaaaacggcaagcaggtcggcacgaaacgattcaatgccaatgtcagtcaggataaagcctcaactaaagccagcacgggcagccagaaggtcagagtgctggcggtggcggacgctgaataccgcgccaaatacagcgactggcaaacgcgaatcgtccagatcgtggagcaggcggatgttgcttttaaccgtgatcacaacattgatttcgtcgtacaggccgtgcaggcttggaattcctccggctcaaacagttctcagattttatcgaatctccaaggcagcttcagaaatcaaaattatcattttgtcgtcggttttaccgcaaaatcaagttttgacgccggcggtatcgcgtatgtatataacggcaaaccgagcggccccgctttcagcgtgaaccttgatcaaggaacggccaacacggcgaaagcggcacagcacgagttttcccataacttcggacttcagcatgacgcccaaggcagcggcatccgctgcgtcatgaattatgattatgcctattccgtggatatttgggacagttcccataacagacagattgcaacaaacaaagcttggtacaaataatagaaaaagagccgctcccaaggagcaggctctttattttgccgcgcgttccgttttgacaaaacacatgcagataataatgagaataaatgccgtcaatgccaggaaaggaatggtaatgaaaccgaaccagttaatatattcagatgagcaaggcacgccgtagacacacggcttgatgccgctgaaaccgggcaccttctgctcaaggtaatgcatgatcgatataaacgcgccgatgacggccatcggcagcacgtattttttcacgcgcgtgtcaccctggaaggtggcgattcctaaaatcaggacaagcgggtacatgagaattctttgataccagcacagctcgcacggtatgaattttctgatctcgctgaaatataggctgccgagcatggcagcaagagctatcacccaagaagcatataaaaatacgattctatttttcatttttcagctctttcttaatcgtttttgaaatctcatcatatttagagaagtcattaatcactttgtcatttacgtaaatcgtcggtgtcgccgtaatgtttaatttatcattcaggtcagtgtcagctttcagctcttttgcaaatgtctctttatcaaggttttccttcagcttgtcaggatcaacctttttcgcggtgcttttgaccgttttttcaagcaatgcaggcgtgacccattcctgttcgcttgacggctgctgttcaaacagcttttcatggaatgcccagaatgatgccgggtcttctttccacacttcttctgaagcaagagccgccagacgcgagccgcttccgtggtacatgacgttcacaaatgaaaatttcacgtcgcctttatcgataaaatcttttttgattttcggaaagatatcgctgttaaatactttgcatgacggacacttgtaatctccgaattcaactaccgtaacaggggcgctgtctttgccgagcacgggctgtcctttaatggaaggctgttcggcgactgtttcgcccgctttttccgtttggttgttaataattacgatggccgcaaataaaacgacaacgattaacgtcagaatcaccgcaaatttcgcagacgattgtttctttttcactcagacacctcattgtttttaaaataaaaaagaagcggatgccggatggcccgcttctctattttaccaagacaaccttgtttaagaaaaccctgaaaaacgaattatctttgacaattattccgctttcactctcatgacgcgcatcgcgttggcaacggcgatcagcgtgacgcctacatctgaaaagaccgcttcccacatggtggcgaatccgaatgcgccaagcaggagaaaaatgatttttacgcctaaagcaaatccgatgttctgccagacgatccggcgtgttcggcgtgcaatccggatggcttcggctgcttttgacggctggtctgtcatcaggacgacatcggccgcttcgacggcggcatcagagccgagagcccccatggcagctccgatgtcagctctggcaagcacaggcgtatcattaatcccgtcgccgacaaacatcagtttttcattcggtaaaagcgccgcttcaagttcttcgacgcggtctaccttgtcacccggcaaaagctctgtgtacacgtcatcaataccgagctctcggccgacagcttctccggtctgctttgaatcacccgtcagcatcactgtccgcttcacgccgagcgcttttaaattggcaatggcctgtttggcgtcctctttgatttcatcggcgatcacgatcgcccccgcatactgctgatcaacggcgacatagacgacggttccgttgttttcagctgtgccggaagcgatttgttcttttgccatcagtttttgatttccggctaaaatcgttgatccgccggttttcacccgaatgccgtgtccgggtatttcttcatattcttcaatctcctcagccgagagcggttgattgtaagcttcacggatggaagaagcaatcggatgattggaatgggcttccgcaagcgcggccgcatgaagcaggctgtcttttgtaaaccctgccgccggtttgatatcagtaacggcgaaattccctttcgttaaggttcccgttttatcaaacacggcgtatgccacctgattgagcgcttctaaatagttgcttcctttcacgagcacccctgctttagacgcagctccgataccgccgaaaaacccgagcggaatggagacgacgagtgcgcacggacaagaaatcacaaggaaaatcagcgcgcggtacacccagtcggatagcgcggctgaaggcacgagaagcggcggtaaaaaggcgagaagcaccgcaacaatgacaacggccggtgtgtagtacttggcaaacttcgtaataaagttttccgttttcgctttgcttccggccgcattttcgaccagatccaatatttttgacacggcagagtcttcatatcctttagaggtttcaatatgaagcacgccgttctgattcataaatccggccatcacatcttgccccggctccgcttttcttggcacggattcgcccgttaaagcggatgtatcaaccatcgaagaaccgctcagcacctttccgtccagcggaatccgttctccgggattcacgacgatgacctgtccgactttgacgtcctgcggcggaacggcagtcatgccgttttccgttttcacattggcgtactcaggacggatgtccaataacgcgctgatcgattttctggatcggctgacggccgctccctgaaacagttcaccgatttggtagaacagcatgaccgcgacgccttccggatattgatgaatcataaatgcgccgatcgtggcaagcgccatcagaaaatgctcatcaaatacctggccgcggacaatgttttttcccgctctggctacgatatcgccgccaatgatcaaatacgaagcaaaaaagagcagaaactcaaggacggcgcccgtgtgcgcgaagtaagcgatgacggccaaaacggctcccgcagccaacctcactaacatcagctgcagctttttgcggtattcatcctcgccgggtttgtcttcgtgcttcgaacgaacggtcacatgaggatcaatggactttacttttttcgcgacttcgtctttcatccattgctcgtttttgccgccggctgagaccgtgatggtgcttgccgcaaaattgacagcacagccgtctatgccgtcaatggcttttacgccgttttctattttttttgcacagttgctgcaatcaagtccgtctaatacaaattcacctttggctgctttcattttcgactcaccctactttccgtaataggattcccataacatcaatacagctaaacgaatttatatatatgaacatatactcatatatttgttttctctattatatgcaggctttgaataaagtgtcaataaaaaagacaaaacaggcatcagcccattttgtctttttttaccttctgtaaacgcaaagcattaaggacgaccgatactgagctgaacgccatggcagcgcctgccacccacggggccagaaagccggccgccgcaatcggaatgccgatgctgttgtatcccaatgcccagcctaaattctgcttgatgtttctcatggtcagcctgctcatgccgatggcgtcggcaatgccgttcaggtcaccgcggatcagcgtaatatccgccgcttccattgcgatatctgtgccggtgccgatggccattccgatatcggccacagccagcgccggagcatcattgatgccgtcaccgaccatcgccacgcgccggccttctttttgcagccgggaaatttccgccgccttttgttcgggaagcacttcggcgatcacgctgccgatgcccgcggcttttgcaatggcttccgcggtctttttgttgtcaccggtcatcatgatgacgtcaagccccatatcattcaggcgtttcaccgcggccggagatgtgtctttgattgtatcggcgactgcgataagccccgccgctttgccgtctgccgcaataagcatcaccgtttttccttccgcctccaagcgggccatgtgcggaagcagcgcctcatgttcgatgtgttccgattccatcagccgtcttgatccggctagaatcgttctgccgtcagcctcggcgtatattccggaaccgatccgggcttggaaccgggtgattttcgggatggcaatcccccgtttttcggctcctgacacgatggcttctccaagcgggtgctctgatcccgtttcggcggccgccgccagccgcaggagttcctcttcgttcattcccgctgccggtacggcgtctgtcagaaccggtctgccgtttgtcaccgttcctgttttatccagtacgatggtcgtcagacgctgtgttttttctaaatgctctccgcctttaaaaagaatgccgaattcagctgcgcggccggagcccgccataatgctcgtcggagtggcgagcccgagtgcgcacggacaggcaatgacaagcacggcgatgaatttgccgatcgcttcagaaaactgtcccggcgccgcccatacataccaaatgagaaaagtcagcacggccagccccagcacaatcgggacgaaaatgcctgaaatgtgatctgcgagccgctgaatgggggcttttgatccttgggcttcttccacgattttaataatgtgtgcaagcgcggtatctttcccgacattcaccgctctgattttgagaaagccgtttgcattgatcgtcgcccctgtgacggtgcttccgggagacttatcaacaggcatgctctcccccgtaatcatcgattcatcaattgcggaatggccttcaatcacttcgccatcgacaggaacacgttctcccggtttcacatatacgatatcccccgtccggacctcgtcaatcggaatcacctgtaccttcccttcccgctcaaccgccgccgtcttcgcctgaagcttcattaactttttaatcgcttctgatgagcggcctttcgctttcatctctaaaagctttccaagcaaaatcaaagtcagcaaaatggcgctcgtttcataataaagcccctctacatgtccgtctcgtccgagagacgcaatcgtcatgtacaggctgtatgcgtaagcggccgtcgttccgagcgcaacgagaacatccatattggcgcttttgtttctcagcgccttatacgctcccatataaaaaggccagccgatgacgagctgcaccggggtggcaagcgcgaattgcagccacggattcatcaggatatccggcatccagataaaagaagtaaaagaaaaatggctgaccatcgaccatagaagcggaaatgagagaacggcagaaaatatcagcctgatcagctgttttcgctgctctttctccttttgggataatccgccatctccatcaaccgcttgcttctcgtctaatctgtagccgagttttgccacggtctctttcagctctttcggtgtcacctctttcggattgtattcaacggtgaccgtttccagagcgaaattcaccggtgcgctgtcaactccccctactttgttcaggcgcttttcaatccgattggcgcaagcggcgcacgtcatgccttcaatctgaaactcggctttttccgtcacaacatggtagccgagtttttcaattttttcttttatggcgcttgcttcgattttgtcagggtgataggaaatgtttgaagtctcaagcgcaagattgacggaagcgtcattgacgccgtccatccgtttcagccctttttcaattcttgaagcgcaggcggcgcatgtcatgccccccacttgaatggtcatttctttcggttcactcaatgtcctcatctctctccataaaccccaggggggtataattatgataaaagaaaaccgcgcccgtttccgcagcgcgataaatcctatacgacgtcataaccttgatcttcaatcgcgtcttttatatctgatacggagactttgttctcatcaaacgtcacatccacctgtccggcttccaatttcacctgaaccgccgtcactccgttcagttctcccactccggtctctactgctttgacgcagtgctgacaggacatgccttcgacttgcagtgttttttgttccatgatgattccctccacgtcttgttttttcttcttcatgttaccatacccctgtagggtatttcaaaacattttattttacgattttgcgatttttttcataacatcaagcagctcggcaatcgcctgctccccgtttccgctttcaatggcgccggctacgcagtgatgggcgtgatcttccagcagatgaaacgcgactttctgcatggccgcctgtacggctgaaatctgcacgagaatatccacgcagtatcgttcgttatccaccatattctgaatgcccctgacttggccttcaatccgtttcagccggttcaggatctggtctttttctttggcgcttttatgatttaacgattgatgctcggtatgtttgtccattttccacctcggtttttttcttcgttatcttcattatacagacttgaaaatccggtgtaaaaaattttcaacacacaagttttaccagtacacccgcggggtatataatgttatcacatatcaagagggggaaattcattgaaaacgttacaagttggcatattgggatatggtttgtcgggtaaagtctttcatgcgccgcttttggacgtccttgatgattatcagatcaaaaaagtcatgacgtccagaacggatgaggtcaaacgtgatctgccgggggctgaagccgtgcgcgcgattgaagacattaccggtgatcctgacattgatctcgtcatcgtcacgacaccgagcggaatgcattatgaatcagcgatgaaatgtctcctggcgggaaaacacaccgtcgtggaaaaaccgatgacggcgacttcagcagaagcggaggagctgagaagaacggctgaaaataaaggcgtcttgctgagcgtgtatcacaaccggcgctgggacaatgactttttaacgatacaaaagctgattcgggacggggcgcttcaagacattcatacatatcaagtcagctacgatctatacaacccggttgtacaggaaaaatggcgcgaaatgaacggacccgccacgggaacgctgtatgatctcggttcacatattattgaccagacacttctgcttttcggaatgccggaatccgtcaccgcacatgtgatgaaacagcgggacaacagtgaaaccgttgataattttctggccgcgctccattacggcaaacttcaggtcattcttcaatccggctccatgaatgcggcaagcggcccgcgctatcagattcacggacggaatgcaagctttatcaaatacggaatggatggacaggaagatgcgctttcagccggacaaaagccgattgacgagagctggggcgccgatgaccctgacaacttcggagaactgacaatcgcagcggatgaaaaacggcatacagaaacaatcccctctgagaacggctcttaccttacgtactacaaactgctggcagacagcatcttaaacggaaaaccgcttcccgttacggcaaaagaaggcatcgatgtcatccgtgtcattgaagcggcgatgaaaagcagcgaacaaaaacggacgattgccctttaatatgaaaaacctcccagccgtacggcggggaggtttttttaagatcagaatgattttccggcttctttcgcgcgggcaatcgcatcttctttaatttgctgtgctttatccggttcagcattatggccttcaacgattaatccgtcaaaagaaggaacgccgaagaagttcatcatgatgccgatgtaacggtggcccatttccatatcagccgccggtccttcagagtaatagcctccgcgcgcctgaatgtgaagcgcttttttgtctgtcaacagaccgatcgggccttgctctgtatatttgaatgattttccggctacagccacagaatcaaggtacgctttcataacaggcgggaatgagaagttccaaagcggtgtgacgaatacgtatttgtcagctgacgcgaattgatcgctcagctcgttcagacggccgactttcgctttttcgttttcagaaagctcgtcaaaacctgtgccggattgaagttttccccagccgctgaatacatccgcatcgatatgaggaatgttctctttgtaaaggtcgatatgtacaacctcatcattcgggtttgattctttataagaatcgataaacgcttttcctgtcgccatgctgtaagatgtcttttcatcatgaggatgagcagtgatataaagtacttttgccattgtaaacagccctttcgttttcagattacacacacatttattatgaaatatgaatgtttttttatactgatcagttctgtaataattatagttacaaaaaaatcttttcgcaacaataatatctcgaaatcagtgtatttttttgaaaaggctgtaatgacgggaatggcaagcagcagaaaaagcagaaacatttagtttctgctcaacatcggatttgatttacagaccggaatatccaacccgagattcccccgcagtgtatccgccggatagctttttcggtacagccccttttcctggaggatcggtatgacatgatccacaaaagcttcaagcatgccggggatgtcagagtgaatgataaacccgtccgccgcttcccgctgaaaccatgtttcaattaatgatgccacatgttccggtgtgccgataaaatgggttcgcggaaacgcggcttcgcgcgccacttgacgcagcgtaagattccgggctttcgcctcccttttgatacggtctgtcgtgctttgaaacgcgtttttcccgacgtcgcccaaatcaggaaacggctcatccagcggaaaacggctcagatcataatcgtcaaaaaatctggccacatatttaacggcgttctctatgggaatcagctcggcgaattcttggtatttcgcttccgcttcttcttgtgagccggctataatcggactgattcccggaaagatccgcagcttggtagcgtcccggccgtaatccgccgcccgcttcttcacatcatcataaaaagctttcgtttcctcaagtgaattggagtgcgtaaagactgcatctgcattcctcgcggcaaacgaccggccggtttctgaagaccccgcttggaaaacgaccggctctccctgtttggaccggccgatattcagcgggccctccacttgaaaatactcgcctttgtgatacaggcgatgcagtttgtcaggggcaaaaaactgcccggtttctttgttgcggacgaaggcatcttcttcccaggaattccacagaccgcgcaccacgtccacatgttcctgggcgatggcatagcgccggctgtggtcgggaaggctttctttgctgtgattgcgcgcggctcccgcctgcggagaggtgacgagattccagcccgcccggccgccgctgatatggtcaagagacatcagctgtcttgcgatggtgaacggctcagtgaacgatgtggaaaatgtgccgattaaaccaagatgggttgtagaggcggcaagcgccgataagatagtgatcggctcaaaccgatttaagaaatgcgggatggacttttcagaaatgaacaagccgtccgcaataaaagcaaagctgaacagccctctttctgcagtctgcgctttttgcctgtaaaacgccgcattcgtgcttgctgtcggatcggcgtcgggatgacgccagccgtccgttgtgccgccgacaccgtgaatcatggctccgaattgaattagatccgtccggctcattttctctccccctttttcccctcgtaatcggcaagcgcccgttctacatgttcaatgccgacttgagtaacggcctgatacacacggctgtcaccgctaccgagttcaacgacggggacatgacggatgccgtatttcatctgcagcacgtcacgcaattcgtcccgctctgtcacatcaattgtttcgtacgcaatggccttttcccgcaaatatcctttcacttcatcgcaatacgcacagccctgtttgctccagaccacaacgtttacttcatgactcatgttcatccctcctataattgtggggccggctgcaccgcttcgcttaacagccggtaagacaatcgtttttcctcagcgtttttgataggcgacaaaatcacaaaatcagtaatgctgtactgaacggataatcgtcgcagctcggcggcagtctcttcttttgtcccggcaatcacacccgtcttttgtgtaatcagcttatatggctgcgtgacttgttcaagaaacgcttccgcttgttcccgggaaccgacattcacctttttgccgtcttcgagaatgattttgaccgactcacgcgatacgacgtgtttttccgcttctgcttttgtatgcgcggtaaataccatcggcgcaaggtgaaattccgccttcgatcctttcggcagatgctcgtcaaaggcgtggcgcgctttttctaacgcagcctcttcaccgtttatgaaataggcgaaaacgaaggaaatgccgagtttggccgcggatatcgcgctttccgcgctgccgccgagcaaaaagaggtcaggcgcatactcagtatgcggcgccggccgcaatgacgcatagcggtgtgagtccggaaaatcatttcggatgaaatgagtcagctcctcaagcttttcttcaaataaacgggcgggctggataagctcccgctgcagcgcatcggttgacagctgaaatccgccgggcgctttgccgacaccaagcgccacacggccgggagcaagagcggacaaaacccggaactgctccgccactttataaggactgtaatgctgcagcatcaccccgccggatgcgagacggatttttttcgtgcttgcggcaagataccccagaacaatttccggcgctgatcccgctatctcttcattgttatgatgctccgccgcccagaaacggtcatatccgtattgttcagcctcctgagccaatttcaccgtttgccgcaaggcttcttctgcggtttggttttccgcggtgacactttggtctaaaatgcttaaacgaatcatacgacaggctcctttatgcgctcttttatgtcataaccgtaatcaggcagcacgcggcggaggaacttcttcgttctttcttttttcgtcttgtaaaagacttcctcaggcgttccttgttccacgattgctccttcatccataaacacaatttggtcggacactcttctggcgaattccatttcatgagtaacaatgatcatggtggcgccggtccgcacaatgttaagcatcacctcgagcacctcgccgacaagctccggatcgagggctgcggtcggttcatcaaacagcatcacatcaggatgaatggcaagcgccctggcaattccgacccgctgcttttgtcctcccgacagctgattcggataggcgtgcaatttatcctgaagccccaccttggccagttcccgctcggcaatggcgtacgcatctgtttttttcattttccttgcgatcgtcaggccttccataacattttgaatcgccgttttatgcgaaaacaaatgatattgctgaaaaaccatcgccgtctgtttcctcagtctgagaatgtcttttttggcaggctttttgcagttaatgacttcaccgtgcagcgaaatggcgccttcatccggccgctcaagtaaattaaggcagcgcagaaaagtggttttcccggaaccgctcgggccgatgatggtcacgacttctcctttccggacacttaaattgatgccctttagcacgtgatgactgccaaaatgtttctgaatgtttcggatttcgatcataatgcgcctccttgatatctggctgcccttttttctgccagactgtttacagcttcgagaatcagcgttaatccccaataaatcacggccgccccgataaatgcttccagaaatgcatagttatcggatgccgcaatcgtcgccgttcctgtaatttcaggcaccgcaacaatggccgcgatggaagtggtatgcaaaaagccgatgcctatgttggtgaagttcggcagcgatatcatgaacgcctgcggcagaaccacacgccgaatcatctggccccgcgtcaagccgattgaatatgccgcctccgcctgccccgtatcgacggccatgatcccggatcggagaatttccgtcatataagcgcctgccgttaatgacagtgccatgatgacaaacacggcgaccggaatctgattggccgaccagccgagatgaaacgcgcggctgaattgatcggcaatcagcggaacccctaaataaatcagcataatatggagaatcgccggggtgctgcggaaaaaagacacgtaaaacgctgagcaggccagcagccatttgatgcggaatatacgcaccgtgatattgccgagagctatgaaaaatccggcaataatcggaatgaccgtcatcgccaatgtaagcggaacggttttcatcatttgtttgatcgcagtgccgataaatggaatatccagctccactgttctccctccttttcagccgtgcgcgctcatgtcaaaaaccgtcacaaggcgcgtctcatctttcttgattcgtttttcggcccatctgaagacacattcaaataaaagggcggccgcataatacagaacagaaagcgagatatacacttctaaagaatgattgctcgatgtaatcaaggtctgtcctctgcccgacatatccatcaccccgatcgaaaaagcgagcgatgtatcttttaagaaaccgatcaccatattcccgatgttgggaaaggcctgcacaagcgcctgcggcagaatgatgcgccggaatgtctgccccccgttcagcccgatgctgaaagccgcctccgcctgcccgcggtcgacgctgttcacacctcccctgatgatttcggccgctcttgccgcgctgctcagcgcatacgtggcgatggccgcatacaaagggtccattttggaggtatcaatcccggcgagcgccgtgagcgccggaataccgtaaaatacaatgaatagctgcaccatgatgggcgttcctctgaaaaaagagatatacagcttcgcaaactgattcaaaacgggaatgcgatagatgcggggcagcgccaaaagcagccccaatagaaagccgaacagcaaagacaccgccaatatatacagcgtgacgggcaaatacccgagcaatgtcggcacaaaggacgcgatcatactgatatcaaacgctttttccattgccgatccctctctttttcacttaatattgctcctttgaataatccgcgccgagccacttttcactcagctttttaagcgtgccgtcatcaatgatttcctgcagggctttatcaatgtcatcgctcagcgtttgttcatttttgttaaacataaagaacactttggcatttgacagcaccccgccgaccgttttttctttgatcgcgctcgttttgttttggaaatcgacggcaaacggcgtagaaatcgtcgcatcggcgcggccggatttcagctgattggccgcatcgttggagccttggccggcataagcaatttcaaacggactgccgtgtttttcattccattttttcagcacaagcgcgccgtttgacgtcggacttgtaatgacccgctttcctttcaagtcctcaatgccgtgaatgttcccgttatcttgaagcaccgtgattttcagcgggaagttgttatacgcgacttgattgaacagaaattttttctcccgttcggcgcttttctccatttgatgggctacgatatcgactttatgctggccgaggctgacaagcaggttggagaaatccatcgttttaaaagtgaaacgatagtccggcaggcgcctgtcaagctctttcaccagctcaacgtcgtagcccgtcaatttgcctttatcatcaataaagcaaatattcggaaattgagtgccggtgccgaccgtaatgttcttcacgtttttctgatttcctgatgccgcctccccgcccgcgccgcaggctgataacgccgccgttgcggcaattgttaatgacatgaccgccaatcttattttcatgtgatcgccccgttttctgcttcaattatttcgtgaaacttgattttgaataatccgcgccgagccatttttcactcagtcttttcaatgtgccgtccttctcaagcttttgaatcgcccgatccgtatcgtccgccagggtttggctgtttttattgaacataaaatacacctcggtatccagcagcacatcaccgaccgttttttgtttgaacgcgtgcgtcttattttgaaaatcgacggcaaacggcgtggatacggtggcgtcagcgcgtcccgtctccatttggtttgctgtatcattgctgccctgcccggcgtatttcaaatgtatcgggctgccgtgggttttgttgtatgccgtcatataatccgccgcgtttgacgtcgcgccgacgatgacggttttcccttttaaatcccggagcgtgtgtatcgcgtcattatccgccttcaccgtgatgtacatcggcgagtagttatacgggattttgtgatacaaaaagcgtttctcccgttccttatttttcgccatattgtgcgcgatcacgtcaattttccggtttcctagacttgtaagcagattcgaaaaatccatcgtcttaaagacaaatttgtattgcgacagctgtttatcaatggcttttatcacttcaatgtcatagccggtcagctcgcctttttcatccataaaagcaatgttcggaaaatcagttcccgtgccgacaatgacggtctgcacgccgctccccgcttttgtgctttctccttgcccgcacccggccagcacgccgagcagcagaagcagacagccggctctgatccgtttttttatcattgcgcccagctcggtgtgcctaacagcgacgcgtcaaaccgctccggtatgagcacctttctcatcatgactccgatgtctccgtctttctcctgctcaaaatacacttcatagcccctccgtctgtacatatctacaagccagggatgcttgcgcgccgaagtgccgagcgtgatggccggggccttcagcgtatctcgcagcatgtgttcctccacataagtcaaaagtttgctgccgatgccctgccccttcagctcaggaagcgtcgcaaaccaccagacgaacggatattttgacggaggcgtgtcactctcccacggaaaacggatcgtaattgttgaaagaagccgtccgtcccgttcgagcacgacggctgaatgattttcaatattttctgttaccatatcgatgtcggcccgcgccgacggccagtcaatctccaaattgcggatcggctgaaacgcgctgtacagcagctctaaaaactccggcgcatcctttttctcagccaatcgaaatatgtcttcactcattccggtcactctccccgccaaaatatataattccaatttgtttactaagctttgattgtttatactataaagcaaactgatttatttgactaatcaaaaaaagtaaaggaaaggttcaagaaaattaatgaacagccgggaggggatttcgttggaattacgcaccattaaaacgttccatacgatcgtacagtcaggcagcttttataaagccgccgaaattcttaactactcacagccgacgatttcaatgcggattaaacagctggaacaggatgtaggcgcgcagctgtttgaacggggaaagaagctgaagctgacaagggcggggcggctgtttcatgagcgggccgggcagcttctcgcgcaatacgaggtgcttgaccatactctggccgacatcagacaggggcaggccggccttattcagatcggcatatccgaaccgacggcaagcctgatcttccctgccgtgctgcgggggtttttagatgattatcctgacatgtcggtcaatgtcagcgtggatgacgccaatacatgcagccgcaaactgctggagggcgccattgattttgcggtatgcggcgagccggagctgattctggaaaattacttcgatccgtttttccatgactcgctcaatgtcatcgtgtccgacagacatccccttgccgccaaaacaagcgtcaatctcgaagacttagaaaatgaatgcctgatttttacgcccgccaattgcccgatccggattcaaattgaacagcacctgcagcgggccatcggcagccgctatcgaaaaatggagctgaccagcagcatggctcaccaatactatgtcagggaaaatatcggcgtctcaatctttacggcgacggcgcactcagaaccgatcgagggcacgaaggtcattccgatccataacttaacaatttcaccgccggtcgggctgttgacaaaccaaaaagaagagcattttgactctgctacaaaagatttaatcagcaggatcatcggccggtttcagcgtgatccgcattaaaaaaacccccgcattacgggggtttttgtacgttcatcttatataatgctccgcaccaagccgccgtcgatccgcaatgcagatccgttaatggcagacgacagcgggctgcttaaaaaggcgacaaagtgagcgatttcttccggacggatcaaccgctgaatgatggacgtcggacgattctccttcataaatcgtttctccgcctccgccgcggtcaggttttcaccggggtaaagcgactcgagcattgtttcgacgccctctgttttcgtggagccgggcatgaccgtattcaccgtcacattcgtcccttccgtgagctcggccagactgcgtgacagcgacagctgcgtcgttttcgtggcgctgtaatgggccatttcctgagaaggcatgacggccgcttcactcgcgataaaaatcacccgcccttccttccgttcaatcatccgctttgcataccggcgtgtcagcctcacgccgctcatgatattcacctcgaaaaaccggagccactcttcgtcaggaatatcaaagtattccgcaggttcaaagattcctaaattgttgacgagaatatccacatccggatactgctgaaaaatcgcgctgcatccttccgccgtgcctaaatcaaatgcggccggatagagacgggcatccggcgtctgtttctctagttcccggatcgtttcgttcaccttttcttcacggcgtccgttaatgatcacagccgcaccttctgcaatcagcgaagccgcaatcgccttcccgatgcctgacgtagatcccgtcacaagcgccgtcttccctttcaactgcaaatccatcatctattcctccctatcgcaagtctcttcttatatatggacagaaatcgaaagcctgaaaccttccgtccctattatcggatagaaaaatggatgaggggaagtacgcactttttagtgcctgtccgttgtcccggctgacggctgatcgatttgaatgaaaaattcaccatctaactctgcctgcgccttttttaatatccttaatacatcatcagcatccgaacccaattccttctgactgatctcaaaattcttccacaccaaagtcagcggatattctatccagcctgtcagacaatcccataaggcattcagattttcaccataaaagtcccggaaatctaattgatcttttaagattcggtgtaaagcttctgtgcttgtaacatcttttccgtctatgatgacgatttccattcacattcactccttgatttcggcatgaaaaaaaccgcagtgcggtcaagtgacggcactgcggttcctctgttatgtatggagacggtgggagtcgaacccacgtccagaaacatcgattacttaagcgtctacgagcgtagcctgcatatttcgtgtttcactcgtcttcgtgcctgcgggcgggccttccgagagctagtctgtcagtctcttcttacgttctcagacgggaacgcaagcgtagcctacttggatgtgctcttcacggacacataggcaatgtcaggaagagctcgctgcgtttattaggcagctagtgctaagttttggttaaaacttttagttttgccagttatatttaggtgcgtgttaacgagatcgcctctcggctcgcagctcaagctcgatccatccctgtcgaatccgtaacgtccccttgttaagggtatacgggagatctatcaagctcttgcttaactggctgtactgttattatatcatgatcacagacaaattcaattgggaatgtcttcaataaacagcctgtgaatctgatgtgtgaacagtatagcatacggcagttatcacatcaaggctcaggcatcagaagcctttttgtctgtctctgaacgctctttcgatttcccttttggcgtcttttcgttttaaatcttcgcgtttatcgtatgttttcttcccttttccgaggccgattaacactttggcaaagccgtttttcaagtacagcttcagcggcacgagggaatagcctttctctttcgtcaggccgatcagcttattgatttctttcctgtgcatcaaaagctttctcgtccggagcgggtcgtggttatagcggtttccctgctcgtacgggctgatgtgcatgttgtggaggaacacttcgccgcgctcgattttcgcaaaggaatccttcatgtttacgcggccggcgcggatggacttaatctccgtcccctgcagcacgatgcctgtttcataggtttcttctataaagtaatcatggtttgcttttttgttttgtgataatactttgcctgatccttttggcatgccttctcctcctctctccgcaaaaaccgttcatgtgtgcgatacgctttattttagcaaatggagcgttccgcgacaatgaaaatgcggcttgcgaaagaaagcaaacagagcattttgccccatttgcttttcgcatttacttcttctttttgcgtttttgttttggcgcgttttggaaaccgcgttttttctttttcttcttcggttttgtaaaccattcccctttttcctccgatttcggcggtgaagccggggtattgctgtttaacacacgtttccgcgccggtctgccgcgttttctgcggtcgcctgtcgtttctctcggacggcgggtgcctttcatgccgacaatttcaaagtcgatgtttctctcatctttattgacgtcgacgactttgaccgtgatttcgtctccgatccggtaaacgttgcccgtgcgttcgccgatcatggcgaaatgctgctcgtcaaaacggtaataatcatccgtcataaagctgacgtgcacaagcccttcaatcgtattcggcagctcgacaaacattccgaaattcgtgacggaactgatcatgccgtcaaattcctcgccgattttatcaagcatatattccgcttttttcagatcgtccgtttcccgctctgcatcaacggcgcgccgttccatcgttgacgtatggtcagcgatttccggaaggcgttcggcccacttttcttgagtcgcttcgtccgattgtccgttgatcaaatacgttctgatcagcctgtgaacgattaagtcaggataacggcggatcggcgatgtgaagtgcgtataaaattcagtcgccagcccgaaatggcccaagctttgcgggtcgtatttcgcctgcttcatggaacggagcatgacggttgaaatcaccgtttcttccggacggtcccgcacttcgtctagaatgctttgcagcgcgcgcggatgaatgtctccggctttccctttgacgatataaccgaatgtcgtgacgaactccaggaacttttgcagtttttcggcgttcggctcttcgtgaatccggtaaataaacggcacgttcatccaatggaagtgctcggccaccgtttcgtttgccacaagcatgaattcttcaatcagcttttccgctactgagcgctctctgatgacgacgtctttaacggcgccttcctcatcgacgagcaccttcgcctctttgaaatcaaaatccacggcgccgcggtccatccgtttcgcccggagaatttcggccagacgttccatgtctttaaacatcgggacgagcggctcatatctttctttcagctcggcgtcgtcttctgtgaggatctggttgacatctgaataggtcattctttccgtcgttttaatgacgctttggaagatctcgtgctctgtcacctggccctgctggttgattgtcatttcgcaggaaagcgtcagccggtcgaccttcggatttaaagaacagattccgttagacagtctgtgcggaatcatcggaatgacccggtcaaccaagtacacgcttgtccctctatccagcgcttctttgtcaatcggggaattctccgtgacgtaatggctgacgtcggcaatatgaacgccgagcttgtagctgccgttatcaagctttgttacagtgacggcgtcatccagatccttcgcatccgcgccgtcaatggtgacaatgacctgatcgcggagatcacggcggtctttgatgtctttttcatcgatggtatcgggcgtgcttgttgcctgctccatcacttcagccggaaaatctcccggcaggccgtgcttatggataattgataaaatatcgatgcccggatcatttttatggccgagtatttcaacgatttctccttcggcgttcattctgccttcagggtagcttgtcagtttgacgacgactttatggccttccgcagcgccgttattggcatgtttcggaataaaaatatcactcgtgattttcttatcatccgggatgacaaaaccgaagcttttcgtttctgtgtatgtgcccacgacgcggtcgatgcttctttccaagatgcggatgaccgtgccttcctgtctcgatccgcttgactgggaattgagccgcaccatgacgatatcgccgttcatggccgtattcagctcattcggcggaataaacacgtcgcttaaagaggtatcctccggcaatagaaacgcgaatccctttgcatgcgcggaaatttttccttttactaaattcattttttccggaagcccgtagcggttgcttctggtgcggacgatctgtcccgtctcctcgagcgccaccagcgcttttaccagctctttaaattcatctgcttccgtgatgttcagcatctcctcaagttcctgaacggtaaggggcttgtacgcctcttccttcataaacgcgagaagacggtccataaacgcttctttttccattattcgacctcctgtttgttaccaatcgagtttctctaaaaattcgtacacatcctgatgaacgaggtcccgttctttatcgagcgtaatgacatgacctgattcttcataccatttcagctgtttgtcgtccgtttccacctcgttgtaaatgatgttcgcactttctgtattaatcatatggtcatgccgtgcctgaaccacaaatgtcggggaatagatcatgtcgacgtttttgcgcacatcggcaatcagctcctgaagcgatttgagcgtattcatcggtgttttttcaaactccttcatttccttttcaatctgctccggctgttttccttcgaattttttataattgcgcgcgtaggagagaactccttcgtacataacctcttcacttttaatgtgcatcggcgcacacataggaacaattccctttatgggtacagtgtaacccaatttcaatgaaaaaaccccgccaagcgacagtccgcaggccgcaatgttttcatagccttcagaccgtaaatattcataaccgtccatgacgtctttccaccaatcttcaggccccgtatgtaccagttcttccggcggaacgccgtggcctttatattgaggcgcgtgacaagtgtagccgcgctcattcaagtagcggccgagcattctgacgtctgccgtatttcccgtaaatccgtgcagcagaagcaccgctttgtctccgcctttaaatgtaaatggttttggtgtcacaattttcatgctcataaccccttttttgcacattcaatttagttttccacagttttgcgagaaacaaacgccgtctctcaacaagaaaaaggcctgatattaaatcagaccttatacaaacattgccttatacgatatacgccagcgaaatcgtcaacacgaaaaacaagactgccagcacaacggttgtgcggtgaagaatcagatcaaggccccttgctttctgttttccgaaaagctgctccgccccgcctgaaattgcacccgataaaccggcgcttttgctggtttgaagcaatacgacaataataagtgcaatactgacgatgaccaataaggtaatcaataatgtgtgcatcccatacacctccagactgactggcctacattgcttctattttacatgaaaaacaaaggcatgtcacgccgtatcggtgcacatcatgtcagaaaaacggaaatgcgtttgaatcttccatcatcattgacttttgtcaacaaagtcgtagtaaaaaagatcttcaaatttcatgtcaaagtaatagagcatttttccgatgaccagctggcccggcctccgctctccattcagtacacggctcagtgtggcgggagatattccgatctccagggcgagctggtttaacgagtagtcattattgaccatatactgcagcacataatctcttctgatctgtatcttttcgaccactttcttcaccttccgttctgtcaaatactttctttcttatacataagatacggcttttgttaacttttgtcaatacttttccagcctggctattccctttagtcaataaaaatactagaatataaatagaccgcgggagggggagagactgtggaaagcttcgggaaacaattgcggacattgcgggaaaaaaggcatctgacagtgaaccagctggcaacgtattcaggcgtcagcgccgcgggaatctcgcggattgaaaacggcaaacgcggggtgccgaaacctgcaaccattaaaaagctcgcagatgcgttaaaaatcccgtatgaggaactgatgcagacggcgggatacatagagaccgtccaggaaacgagagccccgtacgacacgggctgcaccttgctggaaaaagccgaaacgtatgagctgcatgatttatccctattggagcgggagaactggcggcacctgtcgaaagaagacttggttctgcttgataaatactttgcgttcttatcggctgaagccaaaaaaagaacaaatgaagactcatgactttgcacatgtgaggcgatcttattgaacacattcggaaagcaattaagagagctgcgccgcgcccggaagcttaccgtcaatcagcttgccgtctattccggcgtcagctcggcgaccatttccagaattgaaaacgggcaccgcggcattcctaaacccgcgaccatccgaaaattggcggacacattaaaaattccgtacgaggagttaatggcgcgggccggacacatcaaggcatttcaggaagaaatccgcgaaacctccgaaagctatcaatccatctgcgccatctatcagaccgccgttgacagaggcgcggagcatctgccgctgtttgacagcaaaaagtggcagcacttcacaaaagaagatattgaaagcgtcagcaaatactttgattttattgcggctgaagcgaaaaaacgctccccggattcctcatcctctttttgatcctctcctcaacttaacaagcgccagacgtacgttccctccgattttgcggtataatagcagaagacgaggtgaaaaagcatgaaccaatcagaaatgtgccccagattcgaaaaagcggtcgacatcctaagtaaacgctgggtggctctaatcgtctttcagttattgaacggacagcagcgatttagcgaaattgaagcggcgcttccgaatttaagcggaagagtcttgtcagaacgtctgaaagaacttgaaacagaaggtgtcatcaaacgggatgttatccccgaaacgcctgtccgcattgagtattctttaacggaaaaaggctgcgcattagcccctattttagaggaaatttccaagtggtcttcaacatggattgatccttcctgataaactcttttccgcataagcggctgatctctcaaacggacagccgtttttatttttgcttttcttaaacaggaaaacaagccctcaggcgtgcagggcttgtttttgtctgacgccttccagcggaattcgaatctccgcccgggctcctccagactcctgatttttaagtattaattcgccgtggtgaagatgtacgacatgatgggcgaatgtaagccccatgccgtgatgccccgccgaatgtctgcttttatcctccgtgtaaaaaagctgtgtcgctcttttcagcgcttccggcgagaacccgcttccgctgtcggatacggcaagatggagggcggaatcggtgcacaggacgtccacacggatttcccctccttccggcgtatagtcgacggcatttgccgcgatattcatgaccgccctgtggagcagctcatgatcgatcggcgcttcttttctgtcaattccccgttcgctgaggacgagatcaatctgcttcggccccgcaagcgccgccgcgtcacgatatatgttttgaatccactctttgagatcggtatattccacatgaacggcaactgcctcctccgctttagaaagctgaatcagctgtccgacataatgctcgattttgtttccggcatccagaatatactgcgcatattccgcctgctcctcatcaggctttgttaactgaagcagctcggcatttcctttaataatcgttgccggaattttaatatcatgcgcaagcgcgccgatttgttctttctttatccgctccgcctcccactgcgctgccaaagatgcctgaagcgcgtctttcattttcagcagagagtcaatgacatcgtcaaattcttttatacgcgacctttttggattgatatttaaattctgtttttgaatgcttgccgtaatggagctgagtgtgctgaaatgccgtctcagctgattggcgaaacgcgtcgtcacgataaaaacggtcaaaagaagcaaagtgatcagaatcgtaagacccgtccattcataattcggcagatagcgccttaacagcggcgactgaaattccgacctgagtgaatattggagaacgccgtattcatctttccgatttatcaccatgaatcctttttgagcataattaaaatacggctgatgctgaatcttttttctcgcgttggccgcatcttgttccgtcatcgttccttttgtcatccgctttgtttttttatcaaaaacggcgtatgtcatacctgcggggatcatgtcttctgttatcttttccgctgatttcaggcggggtttgatctgttccgcctcatgctcgctgtagtttgcgggcaggatcgctccggcattcatagcaatggcatttaaggcgacacataatgccgccacccccatcgtgctcagacacagtgtgattgtaaatttgacaagctctttgcggatgctggattttccttttgctattcccatttgtatccgacaccccacaccgttttgatcggatcagccccgtgttctttacattttttccggatggttctgataaactccgtaatggttgaatagagcgcatcgccgtccaagccgtacacttcctcgtaaatctgctcccgtgagaatgttctgtttttatgctgtgccagacattcaacgattttatattcgtttttcgtaagaggcagtttccggtcatcaatccatacttctttattgtcaaaatcaaacatgaagcctgatatcagccgtttcgtctgatgcttttcccgccgttcccttctgacatgcgcgtttacccttgccatcaattcctgtacgccgaacggctttgtgatgtaatcatcagcgcctgtcatgaggcctttcacaatggattcttcgtcagactttgccgttaaaaacaggatcgggctgtccaccagcgggcgaatccgccggcagagttcaatcccgtccgttccgggcatcatgatatcaagaagaatcaaatcatagccttgaaaaaaatccaatgactgatcctccgctttttccagaatcgttactgtatgctgatcacgctgtaaaatgtttctgatcagaacgagaatatctttttcatcatcaattgctaaaatgtttgccaccggccgaatcgctccttgcctttattcatatgaacgccgcccttcccatcttctgcaccaatagaggccggccagacataatatcactatagaaaaatataacattatttctccgaatctcatatcgtatcttacataagggaggaactcttttttgactttgtcaaaatgcagcagtcctgcaaggcctgaaagccgtacgctccatgcccacgggaaaaaacgccagatggtatcgccaagtcccgtattcatgagcgccgtcattaataaacccgctccccctaaaagcccggacggtcccatgccgtactttatgccgacaaaaaaagacatcatataaagcggaatactgccggcaatcagccacgcccctccttttaaaaagagaagatacgggagatcattgatgtgaagaacaaatttcatccccgccaaataaagacagatggcgagacctaccgataacacattcaataggagcagcaaaagcagcttgcccgcaaaactgatgattttagaatgcgggaccgccagcatcatctgaaaatggcccgcctgttcctcaaccgaggcagacatgccgcagacaatactgatgattaaagggtataaaacggcaatcgcgctgaaaaacacactgtacagcatataaggctcctgaacccttccatacatatacaacaggaaaaatcccgcgcataaaaccggcgccgcagcatgcatccatatgagcggcgtgcgcttcatttttaatacatcggcccacatatatcgtaaaagcacggtcatgaccggtttcccccttttgaaaaagacacggcggaaacaaaacttaccgcgataaaagaaagaatagaaagaataatagccggaatgatcacgtttccgtttaataagccgctgtttgcaggaagcggaattccgttcggatggatcccgagaatcggtgacatcacccggactgaccagctccatggactcagccaccacaatgaacctgacgccggcacaatgcctaaaacaaaggcggcgatcatattcatgaggatgactgccgtaaacccgaactgtctggcaatccataagcagaacggaatttcccaaagcgtagacagccacaaaagggagcttgcttcaatacctttcagctgaaccgcagcaattgccggaaacataaggccaagcaaaaacatgatgactaaaaagacgatttgcgacaggagtgaatacagcgcgatcaagcttatttttgagaaccatatgctcttcaagtcagccggcagtgagtacaccgcacggtcattcgcagattttttctcttttttaacagataaaccgcacattagagcaatcatgagcggcatgaaaataaccgcccaccaattgaacgtgcccgtcataaaataggcggcattcagcagaaaagaaaaagccgtgttcagaagcgggataagaatgatcagctttctgataaatgttcttttagatgtaagatgttccgcctgcatgtactgaatcatttcccagtccccgctttctcccgtgttgatttgacaacctccagaaacagccgctccagatcgtcttcccggctgatttctccctgatatcctaaaacgccgtcactgatgattccgatatggtctgcgatctgctcgacttctgataacaggtggctagataaaataaccgtcattccctgtccgggcagagagcggataaattcccgcaaatcctgaattcccatcgggtccaatccgtttgtcggctcatcaagaattaagagcgacggacggtttaataatgctaacgcaatgccgagacgctgcttcattcccatagaaaattgtccggcgcgcttttttccagttcccgttaatcccgtgatttccagcacttccgcaattcttgaatcaggcagtccgagcatcacgcagcggactttcagattttcagcggctgtcaggttgctgtaaagcggcggcgcttcaatcagggaaccgatgcttttcaaatcttcgcgcttccatgtatgtccgtcgaacagaacctcgccggatgtttgctgcagcatgccggtcaatattttaagtgtcgttgattttcccgcgccgttcggaccgagcaggccgtatatactgttgcgttttactgatagagacacatcagccactgcctgttgtctgccgaatgatttttgcagctgtctcgtttctatgatgttgctcatttgattacccctctgctttgttatttgataagtaagactttacagcgcagttatcaaaatttaatcaagaaatcaaaaaaaagcatccttcacgcggaagaatgcttttttcatgaggctgagcgtacgatcagctttcttttttgttttttcaccgggctgagggctcgttccagccacgccatcagcaggtctgcggctaccgccatcagcgcggtcgggatggcgcccgccaaaataatggcggttccgtttgtcgcgttcgaccctctgacgatcatatcgccgaggccgcccgccccgacgaaggtgccgatcgccgtgatgccgatcgcaatgacgagcgccgttcggagacccgccataatgacggaaagcgcaagcggcagctccaccatacgaaggatttggtatttcgtcatgcccatcgcttttcccgactcgagataagcgtgctcgatattgataatgcccgtgtgcgtatttctgagaatcggcagcagtgaatacaaaaacaaagccgtgatgaccgtattggcgccgagtcccatgacgagcatcaggacggcgagcatcgcaagcgccggaacggtttgaatcacgttcgccacagcaaacacccagccggcgagacgcccgtgccttgctgtcacaattccggccggaatggcgaaaatggcggcgaaaacgacgccgtacgccgacatgagaaagtgccgccagcactcatacagaacataactgccgttttgagcataatacgtaaacagctccttcatcgtgtccatccgcacatctcctttccgttattcaaagtaatgatgtttttctaaatattccttggccacgacggacggctcttttaatcggccgtcaacttcgtaattcattttctgcatcatctttgtatcaatcgcgccgatcattttattgatcacgccctccagttcgggatgctcttttaatacttgatccggaacgacgggtgaacagtcatacggaggaaagaaccgcttatcatccttcagcgttttcagtccgtaagcgatgattcttccgtcggtggaataagcgagcgcgatatccatctttctgcttttcagcgcgtcgtaaacaaggccgatctgcatcggatacgtgccttcaaatgacattccgtatgtgttcataaaatcctgatatccgttgcctctcagcttcatccagtagttatcgacgccgaatttcagatgagacgcttcttttttgacatcggataccgattctaaatgatacttgcgggcaagctgtccggaaacggtaaagacgtatgtattatcaaagccgtaagaatcaaaccatttcatgtcatatctgttttgaaattcacgctgaacgagccgcagcgctttgtccgggtctttttccggctccatgcgaagcgtgcccgtcagcgcgtctcctgtatagcgcgtcgcggcgatatcaatatcaccgtttatcaaggattgctgctgtacggcattggagccgagatttttaataaccgttgtcttcaacccgctgtgatgttcgatcatctgtccgagcatgctcgcgatgatttctgattcggtcatgctttgcgcgccgattttaatggtgtcctccgatgcggcgctcaatcccgggagcgagcatccgccaaggagcagcatgccgatacaggcgattgcgagcagccgttttttgcatctattccccatgagagacctcctccttatgaagcgtcctttatgcttttcagcccgtcaggcgtgactttccgttctgtcatccccagcatgtaatcgacggctgccgccagcactgtgaccggaacggcgcctgcgataatatactccggctgataaaggttcaagccgataaaaatgtaatctcccagcccgcctccgccgataaaggaggcgagcgtcgcccagccgattaaataaatcgaagacgtcctgatgcccgccatgatgaccggagcggcaagcgggagctctacaagcctgatctgctcccatgccgtcatgccgattccttttcccgattccagaagatgccgattgacgccgagaatccccgtatacgtgtttctgagaatcggcagcatggaatagaaaaacagcgccgcaacggccgggatctttcctacgcctaaaagcggaataaaaaacgcaagaatggcaaggctcggcaaggtttgaatgatgttgacgatgccgatgacggcgccggctcctcttttcatcctcgtcagcacgacgccgagcggaacggcggcgagaatgcccgccgacggcgattaatgagatgtacagatgctcccatgttttataaagcatctctcctccatttgcctgtaaaaattgcacggtctgattcatatcaattgaagcctcctcatgacatcaccgcgagctgattctcttctccccagatggagtcatagacgatgtcaacgaggcttgcccttgtcacgattcccgttagccggccggcttcatcaaggaccggcacaaatttcatgcctctttttaaaattttatggacggcgtcgcggagcagagtgccgcttctgaccgtgtacagatcccggtcaagcacttccgcgacggttaccgcttgtcttcgattgcggtcaatcatctccacatcgacataaccttggagaacgttcttttcatcaatgacgagcagcgaatccacccgctcggcacgcatcagctgaatggcggctgacagtgttttctcaggtgttaccgtcacgggatcgggattcatgatctgctccacccgttcaatatcagggctggatgattggatcagccgttccttgccgataaactcctcaacaaattcattcgccggaaatctgagaatctcatcaggcgttccggcctggacgatttctcccgctttcagaatgacgattctgtccgcaagcttgatggcttcgtccatatcatgggtaacaaatacgatggttttatgtaaggttttttgcagttttttaaattcttcctgaagggaatctctcgtaatcgggtcaagtgccccgaacggttcatccattaagatgagcggcggctctgcggcaagtgcccgtaatacacctattcgctgctgctgtcctccgctcagttcatgagggtaacggtctaaatattcaggccccatatcaacgagctttaaaagctcccgcgcccgttccttccgtttttcggcaggatgctttaaaagcttcggaacgagcgtaatgttctgctgaatggtcatatgcggaaacagcccgatctgctggatgacatagccgatgcttcttctgagttccaccgggtcttgttccataatgtttcggccctctatcaggattctgccttctgtcggttcaattaagcggttgatcattttcatcgtcgtcgttttgccgcagccgctcggcccgataaaacaaataaattcgcctttggcgatattcaggttgatgctgttgacggcttttttcccgcctttatacattttcgagacattttctaatgtcagcaaacactcacacctccacgattaagtttattcaattcgttaaattcaaatttaacttttcagacaattgaacgttttccattataaattaaactttgtaaattaaaaagtttacaatttgtccatattatatataaaggttgtgtaagcactgattaacccgtattgaccggcaaagttcttcttattgctccggattactgccaaattctctcggaagagcatttccgccggtttaaaaatgtggtatattgacatcggaattgctgactgaaaggattgaaactgttggagaaagatccgttacacgtaatcgaacaagctgaagatcatttgatagaacgaatcgctgaaaatatgcatacattcggaatgcccgcgacggtggggcgcattttaggcattatttatatgaaccgcaagccgatgaccttaactgaattatcagaagcgaccggcatgagcaagacgagaatgagtcaggcggtccgtgaaatgcttgacgtcaatctggcggaaaaagtgtttgaaaaaggcgtccgcaaagatttatacgacgtcgagcaggattattaccaaacctttattacgctgtttacggccacatggagcaaggtcgtcagcaaaaataaaatgatgcataaaaagctgaaccgcgaactgacagccgtccttgaaaacggcgtgccggaagaagctgaggaaaaaatcaacgaactgctgaaagaattaaaggattggctagattactacaattggatcagccgtctgatcgagttttttgaaagcgaagaaattttcaagcatgttccgaagccataagaaaaaaacgccctgacccgcaaggcgtttttttcatgccgcattcggcgctttggttcgttttttctttctcaccggactcagcgcccgctccagccatgccatcacaagatctgcgataacggccatcagcgctgtcggaatggcgccggccaaaataatcgcggttccgttcgtggcgtttgagcccctgacaataatgtcaccgagtccgcccgcgccgacaaacgtaccgattgccgtaatgccgatcgcgatgacgagcgccgtccgcagccccgccatgatgacggaaagcgcaagcggcagctccaccatgcggagcacctgaaatttggtcatgcccatcgcttttcccgattcaagataagcgtgttcaatgctggcgatgcccgtgtacgtattccggatgatcggaagaagcgaatataaaaacagcgacaatatcaccgtattggcgccgagccccatgacgagcatcagcaccgcaagcatcgcaagcgccggtacggtctgaatcacgtttgtcaccgcgaatacccagccgcttaatgttctgtacctggcaatgaagatgccgagcggaaccccaacgatcgccgcaaataaaacgccgtataccgacatgagaaaatggcgataaaactcctgaagcacataggcgccgttttgagaataataagtgccgagctgctgcagcacttccatttgccccacctcatttcttattcaaaataatgatgtttctccaaaaattctttagcgacgacggacggttctttcagcttgccgtccacctcgtaattcaattcctgcatcgtttccgtatcgattttgccgatcagtttattcacaatgcccttcagttcaggatgctgcttcagcacgctgtcgggaatgaccggcgaacagtcatacggcgggaaaaactgcttgtcgtcttttaaaattttcagatcgtacgctttaatccgtccgtccgttgaataagcgaggacggcgtccattttcccgtttttcacggcatcgtatacaagtccgatctgcatcggataggttgtgccgaattcaaagccgtacgtgtcggtaaagcccttatagccgtcaccttttcttttcagccacgcattgtctacaccgagcttaaattgatccgcatgcttcttaatatcggacactttgtctaaatggtctttttccgcaagctctttcgtgacggtaaaagcgtatgtgttctcaaatccgtatgaatcaaaccatttgtaatggaagcgtttctcaaattctttctgtacgatggataatgcttttttcgggtctttttccgcttccatgccgagggtgctcgttaaatccgttcccgagtagcgcgtcgcggcgatatcgatttcaccgccgagcatcgcttgctgctggacatagttcgatccgaggtttttaattaatgcagtattcaagtctgtattgtgctcaatcatctgtgcgagcatattggcgataatttctgattccgtcatgctttgcgccccgattttgatcgtatcatcggaagccccgctcaggccgggaagggaacagccgcctagaagcagagcagctgacagcgccagtgcgcacatccatctcttttggtttcttttcaaaacagccaactccttatgatacttccttcagtcctttcagccctttcggcgtcaccttccgttccgtcgccgccagcagataatcaatgataatggctaaaatggtgaccggcacggcgccgccgataatatattcaggctgatagagattcaggccgataaaaatatagtctccgagcccgccgcccccgataaaggaagcaagcgtcgcccagccgatcagataaatggtggatgtgcggatgcccgccatgatcaccggaaccgcaagcggcagttccacaagcctgatctgctcccagaccgtcatgccgatgccttttcccgattccagcagatttttgtttacgccttgaatgccggtatacgtgttccggagaatcggcagcaccgaatagaaaaacagcgcgacgatcgcgggcacctttcccacgcctaacagcgggataaaaaacgccagtatcgcgagactcggcaaggtctgcacaatgttgacggcgccgatgacggcgcctgcgccctttttcattctcgtcagcgccactccgagcggaacggcgacgacaatgcctaatatgacggcgatgatcgaaatgtataaatgctcccacgttttatataacagttctccgccgttcgtctgcaaaaacttgatcatttcattcattgtaagcgttcctccccttgtcagcctgtcaccagctggtcttcctcaccccagattgaatcgtaaacgatgtcgacaaggctcgctctcgtgacaattccgactaaatgcctttgttcatcaacgacgggtacatatttcattccgcgctttaaaattttgcgtacggtatcgcgcagcagtgtcccctgctcgactgtatacagatcagagcggagcacgtcgccgacaaggctcgcttttttccggttctgatcaatgatttcgacatcaacatatccttgcagcacattcaggtcatcaacgacaagcagggaatcgacacggtgttcccgcatcacctgtatcgcctgcgaaagcgttttgtccgccgtaacggtgacaggctttttgttcatcatctgctcgacgcgttcaatatccggtcttgattgcaataaccgttctttgccgataaattcttcgacaaactcattagccggattccggagaatgtcatcaggagtgccggcctgaacgatctctcccgcttttaaaatgacgatccggtcagccagcttaatggcttcatccatatcgtgggttacaaagacaatcgttttattcaatgttctttgcagttttttgaattcttcttgaagggaatcccgcgtaatcggatcaagcgctccgaacggttcatccataagaataagaggcggttccgctgcaagggcgcgcagcacgccgattctctgctgctgtcccccgctcagctcgtgaggatagcggtctaaatattccgggcccatatcgacgagcttcaaaagctcccgcgcccgttccttccgcttttgttccggccatttcagcagtttcggcacgagggaaatgttctgctgaatggtcatatgagggaaaagtccgatctgctgaatgacgtagccgattttccgtctcagctccaccgggtcctgctccataatgttttcgccatcgataaaaatctttccggatgacggctcaatcagtctgttaatcattttcatcgtcgtcgtttttccgcagccgctcggcccgataaaacaaataaattcgcctttttcgatatttaaatcaatgctgttgacagctttttttccgcctttatagacttttgatacattttctaatctcagcaatccgtgcacctccgaagggttccgttatttttctgaaaagtataatctttattataagatgaaatttgtaaaataaaaagtttacaatgtgtttaaattatatacaatatacgtattttttcatgttatcccgctgacaatgcggatgttcttacaatcgctcccgatagctcgcatatcctgccgcatcatctttttcatcaactgtaaaaaatatgatatattgtcagcatgaaaagccagtgaagggatgatcagccgtggaaaaaaacgctcttgatatcatcgggcatgctgaagagcatctcattgagagaatcgccgagaatatgcatacattcggaatgccggccacactgggacgtgtgctcggtattatttatatgaaccgcaagccgatgacgttaaatgagctgtcagaggcgaccgggatgagcaaaacgaggatgagccaggtggtccgcgaaatgaccgatgtcaatctggctgaaaaagtgtttgaaaaaggcgttcggaaagacctttatgacgtggagcgtgattattaccagacgtttatctccctgtttacggcaaattggacaaaggcggtcagcaaaaacaaaatgctctataaaaaactgaaccgcgagctgactgagcttctggaatcggaaaatctcagtcccgatattgaagaaaaagcccgtcagcttttggatgaactgacggattggctccattattatgactggctgagccgtttgatagaattttttgagagtgaagaagtgtttcagcatgtgccgaaaatagaaaaaagcagcacccgaagataaccgggcgctgcttttttaagtcaggaaaccaatatcgggaacatgcctttcagaccggcgccgatcatgccgatggccaccaccgccaaaatcagccccatcagtcgggtaatgacgttcatttcggttttcccgagcttattgctgatgaaagatgaatagtgaaagaagatgaacgtcatcgcgatgacggccgcaatgccgataagcacgctgatgtaatggaagatgccgccatggccggccgacagactcatcaccgtcgcgatcgtaccgggtccggcgataatcggaatcgacaaaggcgtcacagatatatcggctttctccttgctctcccctttctcttcatgatggagagactgtacatgagatttcttcgcgttcagaagattataagcgatgccgaaaataaaaatgccgcccgcgatacgtaaggcatgaatgttaatgtcaaacagtttaaagatcagatggccgaagattaaaaaagccgccaagatgataaacgacagcacggaagccttgcgcgcgatcgctgtccgttctttctccgagtacccttccgtcagtgaaaggaaaatcggcacgtttccgatgggattggagactgcaaacagtgaaatgaagacatgaatgatgaatgaaaacatgcgtacctccttatgacttgccgttattgagttatgttttgttctccgctgtttcttatgcatggtttttaccccggggtctgctttttataacctcagccggacgatccggaaacagaaaaaaccgtccttgtaaggacggttttttctgtttgctatctccataagccttttccgaatttcaacagccgataaagcattttcaatttttttagcatgcgttaatttcctttttcactctgaatcaatgcgccgagagacatgatatctatcagctccaataaaattctaccataaagggtactttttctctattatcaattcatagagaaggtgatttgtatatctttagaaaactccgttacatccgtcctattttcttttataatgtaaatattgaacaaaatccctatattacttgtaaaaggagttttagaatgtattgttctcaatgcggccatcatactgatggcggaaagttttgtgaaaagtgcggggcgccccagcccgggcagggaggcgcaggccaaacgcagggccaggccgctcaggccggcgccgcggctaagcaggcttcaaagcaatttgccttattcgtgcttgatgtgttaaagcgaccgtatcaaacatgtaaaacgacaggcggcgaacagcttgtcagcagcatcatcaacatggtgcttttctgcctggtgacgccggttatgttttatattctcttatcagacggctttcgtgacgtcagttttaccgcggttgtgatcaagccggcgcttacctttgcattatgcgttttttgcctgtatctcttgatttttatcgctttgaaggccggcggcgcccaggtgtcatttaaagattcgctgtccagattcggggcatttttgattccgtttacagctattttgcttcttgccctcatttttatgctgcttcatacaaccgtttgcttcaccattctggctgtcggtcttttaggagcggcgtttgccgtgcctccgctcatgctggcgagctatcagcatcagctcactactaaggcggatatcatttattctgttatcgtcatctatttgatcatttgcgtaacgtttcaattcacgatcaagcattatataaaagaactcatgaattatttcttcttttaaaaacggaaacccccgccgcctgattggcgcgggggtttttttattgaatggatgttaaataaattcttccgtctttaacaatgccgccatacgtccaattatatgttctgagcttcggactgccgccggctttcgtaatataaaactcctcgtacgtgtgaatcgtcagatgagagcctttctgtgaaaagcttttgacattcacttcattaaatacttcggtcgtcccctcgctgtgcagttttttgaccagtttctgctgatcagcatacaaagggcttccctcttctaaattacccgccatgatggcaaaattgttaaggctgacggcgcttgattgatttgtcaggtaatcagtcataaacgatgtgacttgctcgtttgtcacgctgcctgaagctgtgtttcctttggaagatgcccatgcggatgtataggttttcggctggtcgttttttattttttttacatttgtcccagaagaatctgaggcagggtcagctttttcgaaaacccattttttatgttttgtatcatatgagagtacatagtgaaagctcggctcagcctcttccatatcaggcttcgtattcccgtcgaaataagcagactcatgaagctctttacccgtaacagttacttgccagcggccgttctcttgagaaatcgcaaatgaatccagatcaaagcttgtctctttatactgatccttcaaaaaggtgccggaactcttcatgccggataccacttctttcgtctgctctttccaggcggaaccagcctcggtcatctgatcggtatttccgtctgccatcgcttttgtatactgcttcgttgttttgacaatcgtgtccatgattgtttgctgtgtatcttgatccgggataagcgttaagtccacatcagtactgttgatcgggacatcggcagttttcattttcccccaaggaaaatcagcctccacggcggctgtcatggaaccgtcagttaagagcggaccatatgtaacggatgtaaacggatctttatggacggacttgccgtttatcagcagatcgcctttcgcgcttttgaagctgtctgccggagtgaatgtcacatcctcggcgtctaacggcaggtcaaactcaacattccggctgccggccgcctctgcctcttgctttttgacaacgtcaaccgtctcatttttaagcttggcttccgccgtgtagacaccgggtgcatacgggccgaagatttgggtttcatcggcttttttgaccgtacctgttttctcgctgttgatataaagatcggcgcctttataattgcttgtgacgcggaaataaaccggatcgactttcagttcgtaatggtcaaacaaaagaagggtttttccctcttttttgacgtataccgcatctgtttctgatgaattgccgcgaagcgatgccagcagttcatcgtgtttctttgcgtatgcaaggagcggtttgacattggtctcattcagcttcagttttttgtctgaaggagtgagcagggctgcgagctttttcgtgtccccgtcatgaaccgcctgttcgaattgatccgtgagccttttttcagatgtcagccaggctccggttttatatgcggcaatcaataagatcagcgctgcggcaatgccgccccacatgaagagcgtttttttagggatcggctttctcatttgtgaagcaggttcagccgcttttacagccgcctgccgttcaagccggcttcctttcccgatcggttttccgcattctttacagaaatgcgcctcttcgttgttctgctggccgcaatacttacaaaaaaacatgactttcctcctattcaatctgcaaaacttgtataacttttcctatgtttcatattttataataaagtagaatgattttggagttattttcaaaaatagctgtcgatcataacagaggaggagaaacggacatgcaaaaactgagcatccgaaaagccgcggagccggatgaagcgctgtatgaactattgctgctggccgatccgtcgaaagagattgtcgatgattatcttgtaagaggagaatgctatacggcttggacgtcagacgagcttgcaggggtttacgttttattgcaaacaaggcctaaaacgatagaaatcgtaaacatcgcggtaaaagaatcgctgcagaacaggggattcggaaaacagctggtgcgggatgccattgaaaaagcgagacaatcgggagctgacacgattgaaatcggcaccggaaattccagtattcatcagctgtcactctatcaaaaatgcggattccgcattcaggctgtcgaccatgatttttttatcagacattatgatgaagacatttttgaaaacggcattcaatgccgggatatgatacggctttatttggatttatgataaaaagggcgccggctgacatcggcgccccttcgtttaccattcagacggattgatccgcttgtttctctgtatttctttgactcccttgtctgactgaaaaaatagcaaaaacgatcgtaagggtcagtccgaccgccgcgaaaatataatccgcattcatcaacagcagaagccctgtgtagacagcggccgacagcggttcacccattttgacaatggaaaaaatcagtgcaaagacccttccgaaatatgcggccggaaccgtcttttggaaatacagcaccgtttgcacatcaatatacgagatgatgatgccaagcaccaggaagatgatgcactcaaacccatgaaggggaaaaaacagcagcataatgagcagtcccgctaccgttaacgtccgcgggtacagccggttcaagcgttttgtattccatttgaaaaatacggccagattgcccaaaagcatccccgcctgaaacattgaatacatgacggcaaaccatacagaatagttctgctgaaaacgctccacagcaagaatcggccccattactgaaataaggccggcaatgacgagatttacgacgaaaaagtatccgaccgatgtcagccatgccgcatttcctttcagcattctgtaaccggcttttacatcttcagttccgttgcttttttcattgggctgttctgaaatacgaataaacgcgataaatgccgcggagatcaaaaaagcagttccgtttatggcaaatagcatcccgaacggaatagccgcaatcatgatcccgctgatcaattttccgacgatgagtccgatcaagtcactcgtattgatcagagatgtcgcctgatcaagatgctgtttgcggacgagcagcggaatgatcgcgactttcgccggcgcaaacagcatcgattgcagagatagacaaaaggcgcacaccccggctatccacacggttaataaatcgttcgcgctgagcaccgccaagaggatcataatggcggcccggcccgtattgcacaaatacaagatcgacttttttcggaataaatcaatcagcggccccgccagcacgccaaatgtcaacggcacgagttcgataaaagaaataacgccgactagaattttgctgccggtcaattctaacactaacagcggcaaagcaatgagccagaccccgtccgctgctgaagaaaacacctgtgcacaccaaagctttgcatagttcggtgttcgatatgtcatatcagacccttttttgatcctcgtcatcagaaacaccgccgaaccattccagcgttctccatgattcccgtctttccgtataatcctcttccatcacctcaaatacaatgccggtatcttgagtccgataaagctcctgcaaagtatctgcagcacgtctcagcagctcctcagcgattgtcccttcactcggatggcggccctcaaaacagcggacgccgccatgcgggaacgcaagctggcgaaatgagctgaagtgataatgcttaatgctctcttttatcgaaagaaactgaaagaaatcgggatatttcagctgatcatttctgaacataagggcggaagacaagtgagtctgataggtaatcgcccaatggcacagatcccacgtaataccgacatgcttcagatccagctccaccagctctgtaaaatcctcaggataaatgaaaatcggatcaaaatcctctcccagattcccgatgatcggaaggttttccacaccgatccaaatgtctgtccctttcagccgctcatcaaactccgcgaaaaactcaacgatttttttacggtttccttccaggtcatagacttgaaattcctcaaccgtcataaattgattcgcatgaacggttatgcctttggcgccgtatttcacagctagctccgcaaagtgataaagctgttttttgatgtgatcttcatgcacataatcggcatgatctgtcgggaaatgcagcgtcaataatgaaggatcaagctgtttcgcatattccagcgtctgattgaatgttttgagataatccgtttccccaaaggaatggccgtcaaaaatattcgcttccagaccgtatcccgcttccacccatttctcatcgatttgcttcggatcaagtccgaaaaacggaatttgagcaatcataggacagtcaccatgttcctctcacaagcataaacgcttccgcagccgaaaaacccgcttttgctccccacacacgggcattatgttcgatcgcctgcaaagagcggggatgagggaagtctctgagctcggaaccgtaacacgccatcgatttcaatttcgtttcaagctcgttttcaatattaacgaagaaattggcatgaaactgatccttctgacagtaattccattccgtcgaagacaatgtttcataggcaaaaacccgttttaccgtatgaccgggaagcggacgggttgccgtcatgaccgctctgaatacgacggagtggtcaatattaatgtcaccgccgtactgggtatacacaatgtcaggctgaaaacgattgatttgtttctccgcttccttcacgacatccagcaaatccattgaatccattctgttatcaggaaggttcagcctgacaaaatcatggatgcccaaagtgctgagcgcctgctccgtttcttgattagaatgctccataacggaatcttcaggctttttgtaatccgtttttcttgatgacttgccttccgccataatgactgccgacacgctgtcaccttggcggacatgtttggcgagcgtgccgccgacgccgataatttcatcgtcgggatgcgctgcaaataccattactttcatcatattgccctcctttaactaacatttcagctgtatccgctccgcagttcatcagcatatcgagcatggagaggtgagggatatgctccccgaataattgaggatagccaaaatgtcggatctgctgatactcaatgacaattccgtttctttcaaaatcgctttctattaaatagtcggaaccctgactgcctgaataataacggtccgcccccagctcctgacaaagcgctaaaacaaaatcgctttttttctccttccggcattcaagctcagagacataacagagcggcgtttcaattcggagctcttttcggaaaaattcaatgatgtgcatattcaaatcatggagatattcccactcccgctgatagacatcttgaaaaaaatgctggtatcgctcaaaatagggagctttcgcatagttcattttaatcgccatccaatgttttttccgccaatcctgtgtctggtcgattttcatatgccgaagctctatgtctttatattgtttcatctgcaaaggcactgtcaaccatctggggccttgcggcgttttgattctgttgcggttgaggaatccttttttctcaaattgggctgtgtcatgaatggcaaacagatccgacttatacattttttcaaaaaaaccgtaccacggcagataactggattgatggccgcttattgttttcattccggtttcgtaaaaagtcggcattgtttttcttcagctccccaatatcgtttcggtctcgcgatttctttactgtgtgaatagccaaaatcagcccattgaagcttgcggcaaatggcgaattgcagggcgtcacgcatcaataagtaagaggcctgcgctttttttcccgccaggctgtttacattctgccaataatagaaatgagagcggtcatagagaaaaatactgctgctgatcagcgtctcatcctgatatgctccgatccaaaacatccggtccgcaaacgtgtcaagcagcttttggaaaaagccctggctcagcacataagctgcgccgattgacgctgtatgctctttgtagaggtcataaaacgcgccaagttcttttcgcccgatcagccgggtgacaatattctctttttcagcgtatctgactgccgtccgggcttttccggaaatgcccgtccaaagctcgtcaaacgtgtccggaagcgaaagaatccgcgttgccttttccgtccatccttccctgatttcttctgtaaaagaagtctgaccgtacggcagcagcatccgggatatgttccgaccgaatatggcctggatttcactttgaagccattcaaatgagatggggcgatctgaaataacgccgccgtatccgatcatgttgccggataatacgcccttctgttcaaaaagcggaagatagatgacctgtcctccgtccgttgtcagtctgacagggtgaaatgacgtgccgggaagctcttccatgaggattccccaatcatagctttgaaacaaccccgcctgatacatgtcagcggcccgatcccatgcctggcgggtcgtgcatactgctgttttttgcatagttatcaccactattcagtcttattcttttgctcataatatgataaaacggattcggctatatatctgacttgctccttttgaagaggaggtttaaaaggcagagaaagaactctcttccaaagcgggtcttccccgccttcccccgcgtatgtttcataaatcggaatacgttcgaggggaaggtagttccagcatgtttggatgcctctttcggctaaataaacggaacacccgtaccgctcttcatcccggggaaatacaattgttaaataattcagatgttctccttcttggggctggatcattcttatgccgtttgtttctcccgcctttgcaaagatttctcccgccgtctctaagtttcgaagcgaagctgttacaagctgatccatacgtgaaagctgatcatcaataatggcttcccttgccggatgcatgcgaagcacgggtacaacagccggtttatccggcagagcttcgagctttgtggctttcatggaaggcatggcgcccgcttttctaaacatatatgaaataggatgatgccgtttccgtttcattacagcttggattctttgatttctgatatagattcgatagtcagctgccacttggctgcgctgttccatcgggagatttgctttttgccgaagccattctttcggcgcgattaacgcgccgcctccgatactcgcaagcggctttgaggggccgaagcttaaaatgccgaaatcgcccaaaccgccggcaaatgtatccgcttgttttgtaaacatggcttgagcggcatcatcaatgacagcaattccgtgttccttcgcccagtcaatgatagcggtattttctctccggccgtatacatgcgtgaggataaccgcacacgtacgcctcgtcactttttttttgatatcctcaaaagataagaatagatgctcatccagctgcgcaaacacaggcgtcgcaccggattgcagtacggcatcaatgacattcgggcagctgaaggatgagaaaatcacttctttccccggcccggcccccgaataagttaatgcgagcaccagtgccgcactgccgctggaggtcagcacaacccctttcccgtaacgtttttccagtttttcagtcagtccgctttgtccggcagtaagcaagtgtttcactgcgcgcagacggccgctgacggaaaactgtccgggataaacgggatatttgaccacttccgggtttttaggaaagtgaaagtttgtgcttttgtctttcatcttttatgatctccaggccttcattcagacttactttcggagcgtaaccgagcaaacgtttcgccttctcgattgacggcgcccgtttaaaaatctcgatgtcttttcccctcacgccgtcttcgcccagctttttaaacagatagttatccttctctctgcctgagagcacattgactttttcagccagttcttttatcgtgatcggctggtcgttcccgatattgaagtcttcaaagacggctccttcatgaatgagagcgagataagttccggtgatgatatcactgatgtagctgaagcagcgtatttgtccgccgtccccgtaaagaggcagctcagagccattctcggccaggctgaaaaacttgttgatgacaaaatcctcgcgctgtttcggcccgtatacattaaagtaccggacgacccgaatatgaagttcgtcggaagcctgttctctcaaatattcctctgattgcagtttggcttttccgtaagctgatttcggaagttttctgcttgtctcggtataaggaaaatccggtgaatctccgaacacttctgaactcgatgagaaaagaagtgtgctgattcccaattcaccgcatacctcagtgacgtttttcgttccttcaaaattgacccgtatgacgtcttcttcattgcttcggcagctgtccactccgaccattgccgccaaatggacaaccgcatccgctccccgcagtgattcgcggagggacgtccggtcaaggatatccgtttggcggtattcagtgtcaaaagccggcttcttttggtctgcaatgatggtgtgataacctttagcctgtaataatgccgccagttcgcttccgataaaaccggctcctccgataatcgcaatatgtttcatgatcctacctcctggctgatagtcaaaacttcttttatagacttgacaatatagctgcaatcctcatctgataactggctgtaaagaggcagtgacacgatctcccggaaaacacgttcagttaccggaagctccgcaggaaaatgttttttatagtaaggatgcaaatgcacgggaataaagtgcacgctcagcccgatttgtttttctttcattttctcaataaacagatctctgtccataccgccgttttctcgaatccgcaaaataaataaatgccatgagtgcgttatgccgcttggaatgtcagaaagcggaagcgccgctttatcagattgacctgacagttcacgtacataaaattgagcgatctgttcccgtttttcttgaatgtcgtttgcgcgcttcaattgaaccagaccgagcgcggcctgaatatccgtcatattatatttaaagcccggcagtaaaacgtcgtatctccagctgcctttttcaccgtaccggttccaggcattttttgtgatgccgtgccagccgtacagcctcgctctttctgcggcctgttcgtctttcatgacgagggctccgccttcccccgttgtaatatttttggtggcataaaagctgaagcacacggcatcgccgtgagtgccgatcatgcttccgttatattttgtaccgagcgcatgagcggcgtcttcaatcagatacaatccgttttctttacaaatggattgcaagttttccagatcagccggatagccggcaaaatgaactgcaattaccgcttttgtgcgcggcgttattttcttccggacatcttcaggatcggcacatagacttttctcgcatatatccgcaaacaccggaacggctccggcgtgcaggatgacattgacgctggaacagaacgtgaagctcggcacgatgacttcatcgccttctcccacaccgagcgccaataaagccatatgtaatgcagcggtgcctgaattacagctgatgacgcgttcggctcctatacattctcccagctttttttcaaaatcgattaccttcgggcctttcgaaatccagcccgattgaatcgtttcggttacgcttgcgatttcttcgtttgtcatatcaggtctgtgaaaagagataaatcgattactaatgaccgttccctcctataaagtgacaactctgcaattgtcggctgatttttccttgcatacatttcttgtgtcaaagataatcggtgaggcatccttcaaaatactgtagtcgattacatcgtgatctgtatgaatgatgatgacgtcgtactgattgatttgttcttttgtgaaagggacagattgtttgcagcttccgtcattcaagcggatctcgctgataaacggatcatgataatcaatcgcgcatcccttgtccatcaattcttccattatcgtaaacactgaggattcacgcgggtcatttgtattttttttataagcggcccctattattaagatgctgcatttgtctttgcccgccagtttcaaagcatagtcagagacagaaatcggcatgttggaattgatttcgtccgcgagatcaattaattttgtctgcagccctttttcattcgcgatccatttgaagtaaaaaggatcaatcgggatacaatggcctccgactccggggcccgggataaatttttgaaagccgaacggcttcgtgtccgccgcgcagatgacttcccatatatcaatatcaagttcacggcaattaagcgccatttcattgataagagctatattgacataacgataagtattctctaggagtttagctgtttcagctacttcgggtgaggtgaccgggtgaatgcttgtaacaatggtgctgtaaaacgctgaggcaagttctgtgcaagtctgtgtggttccgccgactactttaggaatatctgaaacttcatattgcctgttgcccggatcgattctttccggagaataagccgtaaaaaagtctgttcctattttcatgccgcggcttgatgccattctgtcggcaatcttttttttcgttgttccgggataggtggtgctttctaaaattaaaagctgatgctgccttccataagcaatcatgctgtcaactgcactgtcgatgtaggttaaatcggggatcttgtcttttttgttcaggggtgtcggcacacatatcacaatgatgtcgcattgttggatgagcgacatgtcggcgctgatttgaaagcgttttgtttgtaaagccgagttcagtctgtcgtcctctatatcttgaatatggctgcttccggcggctaacaaggaaaccttttcactgtttttgtcgaatccgataacattgtatcctttatcgacgcattccagcgcaagagggaatcccacatatcccatgcctaacacgcctacaatcgcctgcttcgtttcaatcagatgtaacagccgtttttgaccaaggttgctggcttcttttgtgacagtattcatttttcgccccctaatagatagaaaagagtattgttttttacaatttaaaacaaatatcgatcgatatcgcaattataacaaaagttaaaatttgataaatgagttttacatccttttataaattaggtattatctatttatttttcttttatttgtaaaataaaatcctgtcaaatggtatatatctggtaacgagtgagaaaatctcccttaattgagagaatatacagaaaataataaaaaaacaggccgaagcctgttttttattctttcactgcctcagttacagccgcagaaacgagtgatcccgctttctctaatcgttctttgctgatgtgtttcatattatcattctcagtgtgataccagggccccggctcctgtgtatcggggctgagccaaatccagttagccgacggaatccctgcttcataaaaagagacatggtctgagtaaccgagctgaatcaggtttggcttgaccaaccgggatttttcagcggctttttcagcataccggacgctcgggttttccttgccgtcaggagtcgtgacacacatttgactcgcttcttcccagtcagtcgcaatcatatcggcattaaaattggcctggctgtgctttctttcattgttcgtgagtgtactgacgtaataagatgaacccgcagaccataattcttctgcaccgaacaggataaagcggatctctttgtctttcggtatgtgtttgagttgcttgctgatttccagaacggcagatgtgcctgaggcgttatcatccgctccgggcgcgccttttacgctgtcataatgcgctgtgacataaataatatcagcatcagaagagttggcctgtgccgctttgcgcgttcctataatattttgtgaggtgcggtttttatagtttttaaattgaatgactgcctgcttttcctgcagcagtgcttcaccgtcttcttttttcatacccgccgccggtatcgtgattcctttatcggtatgcggacggacggcgagcggttttgttgtctgattataaataatgactgctttggctcccgcttgttcggcatgtttgatcttttgagaaacggggatctttccttcgcgtatcactgcaatctttcctttggctcctgttacgtcatcgcgtgatccgcagccgccgtcaaaaatccctccctcaattctcagctctttttcaacagcggattgatcagcggagcggagcgggaattcatgatctcccgctgtgactgaacctgaaaagtactttttcaatggaaatgactgtactttgacactggcgccctgagcccgcaggcgattcgatatgtattcagccgcttccttttctttcgcagttccggtttcccgcggtccgatggtttcactcagatcatgcatcgtgtccaatgcctcatcagcatcaaaaaccggcgcggccacggctgaataagcatgagtttcggacagcggcccggcagacgcgccccatatgacgcttgctgccaccgcggctgacataaatgaaaatttcatcataatccctcctcttattaacacctcttccctttcgattgaagaacactgattcctttaaaaaggggaaaaatgaatattattgaccaaatgaagatgatgaaaaaggagggaaaagcccgggagcataaaaaaacgccgggagaatatctcccggcgtccattccattacttattcaagttatagaaagagttgataccgtggtattgagcagtttcagccaactgatcttcgatgcgaagaagctggttgtatttcgcaacacggtccgtacgggacggagcacctgttttgatttgtcctgcattagttgccacagcgatgtcagcgattgtgctgtcttcagtttcacctgaacggtgagagataacggcagtgtagcccgcgcgtttcgccatttcgatcgcatcgaacgtttcagtcaatgtaccgatttggtttactttgatcaggatagagttgcctacgccgtttttgataccttcagcaagctttttcgtgtttgtaacgaaaaggtcgtctccgacaagctgaacttttttgccaagacgctctgtaagaagtttgtggccttcccagtcgttctcgtcaagtccgtcttcgatagagatgattgggtatttagaaaccatttcttcgtaccagtcaaccatttcagcagatgttttcacaacgccttcgccagacagatggtatttgccgtcttctttgttgtagaactcagaagatgcagcatccatcgcaagtttcacttcttcgccaggtttgaagccggctttttcgatcgcttcaacgattgtttgaagcgcttcttcgttagaaccaaggttcggagcgaatccgccttcgtcacctacagctgtgttcattcctttagcagaaagaactgatttcaggctgtggaagatttgagcgcccatgcgaagcgcttcacggaagttaggcgcgcctacaggcatgatcatgaattcttgaatgtctacgttgttgtcagcatgctctccgccgtttacgatgttcatcatcggtacaggaagcgtttttgagttgaatcctccaaggtattggtaaagaggaatctgtaagaaatcagcagctgcgcgcgcacaagccatagatacgccaaggattgcgttcgcaccgagtttgcctttgttttcagttccgtcaagctcgattaaaagctgatcgattgcgttttgttcagttacgtcaaagccgagaagctctggagaaatgatttcgtttacgttgttaacagcagttaacacgccttttccaaggtaacggtctttgtcgccgtcacgaagctcaaccgcttcgtattcacctgtagaagctccgcttggcactaatgcgcggccgaaagctcctgtttctgtatatacttcaacttcaactgttgggttgccgcgggagtcaaggacttcgcgtgcataaacatcaacaatgtatggcatgagtttgtctctccttttgatttacgcttatttttgaattaaagatgttccggtcatttctttcggtttttcaacaccgagaaggtctaataacgttggtgcgaggtcgcctaggattccgccttcgcgcagcgtcacgccttctttcgtcacaatgacagggactgggtttgtcgtatgggcagtgtgcggttcgcctgtttctgtaatcagaatgtctgcattaccgtgatcagcggtaatgatggcatgtccgcctttagcgatgatggcgtcaaccacttcgcctaagcattcatccactgcttcaattgctttaatcgtcggttcgaccattccggagtggccgaccatgtcagggtttgcaaaattcaggatgatcgcgtcgtgcttgtcagccgcgatttcttttacaagagcatccttcacttcatacgcgctcatttcaggcttcaagtcatatgtcgcgaccttcggcgagttaatgaggatgcgctcttcgcccgggaattcttcttcgcggccgccgctcataaagaacgtaacgtgcggatacttttcagtttctgcaatgcgaagctgttttaacccgtgctgtgccaatacttcaccgaccgtattgtcaaggtttaccggtttaaaagccacatatccgtcaacagattcactgaagtgagtcaggcagacgaaatacaggtttttcggatgattttcaccgcggtcgaaatcgcggaaatctttgttggtaaacgtgtttgaaatctggatggcgcggtctggtctgaaattatagaaaatcacagaatcgccgtcatgaattttcgcaacgggttcaccgttttcttttgtgatgacggacggaatgacgaattcatcatgaatgccgttcgcataagaatcgtcgactacatccatcgcgctgcggtaagacgggccttcgccgtaagccattgcgcggtacgctttttccacacggtcccagcgtttgtcgcggtccatggagtagtagcgtccggaaatgctggcgatttcgccgacaccgatttcttcgatctgctcattcagctgctgaatgtaagttttcgccgtttgcggacctacatcgcggccgtcgaggaaaccgtgaatatacaccttcgtcagtccttcacttttcgcaagcttcagcagcgcgaataaatgattgatatgactgtgtacgcctccgtcagaaagaaggccgaacaggtgcagcgctttgtcgttgtctttcgcgtttttgatggcgtcaaggaacgtttgattgcgttcgaattcgccttcgcggatggcaacgttcacgcgtgttaagctttggtacacaatacgtcctgcgccgatattcaaatgaccgacttcagagttccccatctgtccttcaggcagtccgactgcttcgcctgatgccgtcagcgtctgatgagggtattggttccaataacggtcgaaattcggttttttcgcttgtgcgactgcgtttccgactgtttcattgcgtaatccgaacccatcaagaatgatgagtgcagctggttttttactcatattgaccttcctccaataattgaacgaatgactgcggttcaaggcttgcgccgccgaccaaagcaccgtcaatatcggactctgccatatattctttaatatttgcaggttttacgctgccgccgtattgaatgcggagcttgtcagcagtttcctggctgaagctttcagcaacgactttacggatatgcgcgcagacgtcgttagcatctttcgctgtagaagatttgcctgttccgattgcccagattggctcgtacgcaataacggaagcggcaacttgctcttcagaaagacccgcaagaccttttttcacttgatcggcaacaagatcatttgtttttccggcttcgcgctcttcaagcgtttcacctacgcaaatgatcggcacaatgccgtgtttgaaagcggcatgcgcttttttgttaactgtttcatcagtttcagcgaacatttcacggcgctcagagtggccgatgacgcagtaatccacgccaaggtctttcagagcgaccgggctgatttcacctgtgaacgcaccgttttcttcaaaatgcatgttttgggcgccgactttcaggtcagttcctttaacagcagaagtcagcttttctaagaaaagagctggtgcgcaaacaacggcttccgctttgtctgctgctggaatggaagatttcacttcttcaacgaagctgacagcctcgccgagtgttttgttcattttccagttaccggctataattggttttctcatctgttccacttccttatagcagtttttatttatcgttcagcgcagctacacctggaagctctttgccttccatgaattcaagggatgcgccgccgcctgttgagatatggctcattttgtcagcaaggccgaatttttcaacggctgccgcagagtctcctccgccgatgacagagtatgtatcattagcctctgccaatgcttcagccactgcttttgtgccttgagcgaacaagtcgatttcgaatacgcccatcggtccgttccatacgacaagtttgctgtttttgataacttcagcgtacgtttcgcgggttttcgttccgatgtcgatcgcttctaaatcacttgggatctcagagatcggcacgatttggacgtttgcatcgttagagaaatcatcagcaacgagaacgtcttccggcatatagaatttaacgcctttttctttcgcgcggtccatgaatgattttgcaagttcgattttatcttcttcaagaagagatttaccgacttcataaccaagcgcttttacgaatgtgtaagcaagacctccgccgatgatcaagttgtccactttatcaagcagactttcgattacaccgattttgtcttttactttcgcgccgccgatgattgccgtaaacgggcgctcaggatttgtcacggctttgccgagaacgtcaagctctttttccatcaggaatcctgcaaccgccggcagatgctcggcaattccggctgtagatgcgtgagcacggtgggcagcaccgaatgcgtcattgacatatacatccgcaagctcagcaaatgctttagcaagctcaggatcgtttttctcttcaccagggtagaaacgtacgttttccaatacaagaacgtctccgtccttcatatcagaaatttgtgcttttacagcatcgccgtaagcttcatccgcttttttcacttctttgccgagcagttcgcctaagcgtgcagcgacaggagttaaacgaagctcctcaaccacttcgcctttcgggcggcctaagtggctcgcaagaaggactttcgcgccttggtctgcaaggtgtttgattgttggaagcgcagcgcggatacgagtatcgtctgttacttccccgtctttcattggaacgttaaagtcaacgcggcagaatacgactttgccttttacgtcgatgtcttttactgtttttttattcatgccttaggagatcctccttcaaaatggtttgcatagcacgaaaaacgtgaaacgtgaaaccgcctcatgatgcttccgccgcggggcagattgcagcttccgggcacggggcagatcgtcttctgagccagggcaggcggctcagaaaacgaaagtgccgcggaaacttcaaaacgcggacgttctgcagcaatccggcgctttctgaaagccggttctcatggaaaaagggaaagggagtccgtccccttcccttgtccgctttcattatagcgtttctgtccgaaagaaccaagtccggccctttccgggagctatgaattaaagaccttgttttgcgatgtaagctgcaaggtcaacaacgcggttagagtagccgctttcgttatcgtaccaagagattacttttaccatgctgccttccataaccattgtagaaagagcatcgattgtagaagagttagcattgccgttgtagtctccggatactaatggctcttcgctgtagccaaggattcctttaagatcgccttcagccgcttctttaagagctgcgtttacatcttcagccgttacgtctttgttcagttcagcaactaggtcaacaagagaaacgtttggagtcggcacacgcatagctccgccgttcagtttgcctttcagttcaggaagaacaagggaaactgctttagcagcaccagttgatgtaggaatgatgttttcagctgctgcacgcgcacgacggtagtctttgtgcggaagatcaagaatttgctgatcgtttgtgtaagagtgaacagttgtcatcataccgcgtttgatgccgaatttgtcgttaagtacttttgcaaacggcgcaaggcagtttgttgtgcaagatgcgttagagataacatggtggttagccgcatcgtatttgtcttcgttaacacccataacgattgtgatatcttcttcgttagcaggtgcagagatgataacttttttcgcgcctgcttctaaatgtttcgcagcgtctgcgcgttttgtgaagaaaccagtagattcaactacgatttcaacgccttgtttgccccagctgagtttcgcaggatcgcgctcagcagaaacttcgattgttttgccgttaacaacaaggttgctgccgtcaactttaacttctgcatctaattttccgtgtacggaatcatattgtaaaagatgagcaagcatgttagcgtctgttaaatcgttaaccgctactacctcaacttcaggattgtttaatgctgcgcggaatacgttacgtccaatacgaccaaaaccgttaataccgacttttactgccatgattatttcctcctttaaataagtgagagatatttatattgagggactgttatcccttaataacttctttgcggctccttcgtccgtgacgagaaccgtgtttcgctgctttttaaaataagcttcgattgcttctgcttttgatgatccgcccgctaccgcgataatgtcgggaatggcatcgaggtcatcaagctgcattccgactgaatgcaccttgtgaacgacttctccgtccgcattaaagtagtagccgaatgcctctgtcaccgcatgattgtcatctattttcttcaaatcttccaaaggcgtgtttcttcgctccgccattgttctagcttcgccgattccgtgaacgagcatactcgctgatttaatcgtgtgaagcacctcttttacggaaggctcttcaataatagatgagtaggcgccttgtgacagctgcccgggaacgaacaaaagccggtaagtgcctgaagccttttccgccatatgcgcgcatatggtgttcgcctggtttttcacatcttcgcctaaaccgcctcttgcgggcacaaacaggagttcgcggttttttgaatccggcgtcatcatatcggcgacggcttcaattgtcgtaccgccggttacagcgacgatatttttgcctgaaaatctctttttcatacatgcaacggccgctctccctaattcttttttgacccaaggagattggtcgctgtctccggaaacgataatggcgtctttcagattaagccgctcttttaatgtcttttccagaagcgtcaatcctaaaacatccttcatcgtatcttccagaatcgaaagcagtgaatagccctcttccgtcattgtcatgccgtttgttttaatatcgatgagattctgttctttcaaaaactgaacctcgcttctgagaacgcgctcggtcaatccgagactggcagcaagacttctgcggccgatcggttcggtaagcctgatatactgcaagatttcaaatcttttctgcatcacaagcaaaagatcaggcaataattttttttgagcttgtattaactggttcatgactcaaacgttccttcctattcatactggacagaaaatgtcccgctatgacaaaaaacgtcccatcatagccaaaaaaaattatgtctgctttctttaattattttaacaggatgacattgttaattcaactgttaaaggtcaattcctcgacattcttcgcaggattttccagtatctccttgatacagtcattatatacagaaacggaatgaaggtgacagacaaaagcccgccggagcggacttttgtcgtaaaacgctttcattttatccagagtttttctatttcttctaatgatttatttttcgtctcagggcagatcgtcacgacaaacaagaaacagagaatattaatgacggcgaatatccagaaggtgtacgcgagccctaacccgctgatcatcatcggcacgaactggccgatcgcccagttcgccccccacaggaatatcgtcgcgataccggcggcgcgtgcgcggaggtggttcggaaagatttctgaaatcatgatccacgtaatcggcccgactgaaacgcagaaagcggcgacgaatcccaatataatgacgactaaagccggcccgcttgcaagctgaaaataaaaggatgccccgattaagatcatgaacagcgccataaaggcagatccgacccccatcagctttttccggcctaccttatcgactaaaagaaccgcgataatggtgaaaatcacttcgacgacaccgacgatgcatgtcgtgataaaccccgcattctgtccgaagcccatcattttgaaaatttccggcccgtaatacgtaattgcgttcatgccgatgacctgattgaataaagccagcagaatcccgatcacaagcgcttttctcagccccggcttaaacagctgagacaatgaacccattttttctaattgtaaagacgtttcgatttgtttgatttcttctttcgcggtctgctcgccgttaatgcgcgtcagcacggcgagggcttcattctggcgccctgctttcgcaagccagcgcggactttccggcacgataagcagcacgataaaaaagatgacggacggaatcatgccgtaagcgagcatccaccgccagccggtgtgcactccccattcatacgagccggactgctggacggcgaggttaataaaataagtgccggatatccctaatatcgtaaacagctgatacagtgaagacagactgccgcgtatggccggcggagcggcttcggtaatatacgtgacagaaagcgaggagcccatgccgattcccagaccgccgatgactctggcgatcactaaggaagacacactttgagaaagcgcagagacaaccgctgacaccgcaaacaacagcgccgctgccatcaaaatctttctccgtccgaaacggtcactcaaaaatccggaaatcccgacgccgaaaacaccgccgatcataatgcttgaaatcacgagcccttccataaaaggacttaagcggtacaaatctttcaggaaaccgatagcgccggaaatcaccgccgtgtcataaccgtacaaaagccctcccagtccggccgcgcatgagatgagaatgacaaaccacttggaatgctgccgagtgacaggtacatttgagccaattggtgccgggtgattcttcatgaattttaccctcccgcgaataatagaataaaaacgcttacaaatctgagtgcggcgcttgatgttgctttgttttcttcagaaccgccacatttgtacgtacttataaagaattttatctaaaaataagggaaattagtacgtacaaataaagaataagcagtttttcataatctgtcaattatttttacagcttgatgaaagggcttactatgttatactggaatttgtccgtatacattttggaggaattgatatgctaccgaaatatgctcaagtaaaagaagaaatttgttcatggctgaatcaaggaaaaatacagccggacgaaaagctgcctacggaaaatgagctgatgcagcagttcggcgtcagccgccataccatcagaaaggcgatcggagatttggtctcgcaggggctgctgtacagcgttcagggcggaggcacctttgtcgcttcacgcacggcgaaatcagccatgcattcaaacaaaacgatcggcgtcattacaacgtacatatcagactatatttttccgagcatcatcaggggaatcgaatcttatttaagcgaacagggctattccatgctgctgacgagcaccaacaacaatacagaaagtgaacggcgcggtcttgaaaacctgctgtccaaaaatatagacgggctgattgtcgagcctacgaaaagcgcgctgcagacgcccaacatcggctactatctcaatctggagaaaaacggcattccgtttgccatgattaacgcctcttatgcggagctggccgcaccaagcttttccgtcaatgatgtcaaaggcggcatgatggcttgcgaatacgtcatgtccctcggccacacgcacattatgggaatctttaaagcggatgacacgcagggcgtcaaacggatgaacggctatctgcaggcgcatcgggagcgcgggattttcccgtctccggacatgatcgtcacttacacgactgaagaaaaagaaaccgtgcttctccaaaaaattaagcatacccttgagcaaaacagcggatcacacccgacggccattctttgctacaatgacgaaattgcgctgaagacgattaatcttctcagggaattcgggttaaaggtgcctgatgacgtatcggtcatgggctatgacgattcacatttcgcccagatttccgaggtgaagctcacctctgtcaagcatccgaaatccattatggggaaagcggcggcaaaatacgtcatcgactgcttagagcataaaaaaccgaagaaggatgacgtcgtgtatgaaccggaactcgtcatccggaattcagtcaggcggatcggcgaataaaaaaagcaatgtgcgcggcacattgctttttttgctcagctgttttttaattcggcgatgatctcaaatgatctcattctgtcggcatgctcaaagctttctgaattcaccatgatttcatccgcctgtgttgtccggatgaagctttccagcttttccttcacacgctccggtccgccgacgatcgttgaactgagctgttcattgaccatcgctttttcatacggcgaccagatttgatccatgtcttcaacaggaggcttcagctggttcggcgtgccgcggacgaggtctaaaaatctttgataatgcgatgttgccagatgctccgccttttcgtccgtatcggcggcaatgacggtgacgccgaccatcgcgtacggttgatccagtacgtctgacggacggaaggagctgtggtacagctcaagggcgggcacggtgtttttcggtgaaaagtgagccgcaaaggcgaacggaagcccgagctctcccgcaagacgcgcgctgaatccgcttgagcccagaagccagatcggcacgtccagcccttcgcccggaatggcgcggacttgattgcgcacattgcctgtcggtttgaagtaatttctcaattcttcaagctgctccggaaaatcttccccgctgtttatgtttcttcgtaaggctctggccgttaattggtcggtccccggcgcgcgtccgagccccaggtcaatccgccccggatataacgtttcaagggttccgaattgctccgcgatcacaagtgaagaatgattcggcagcataatacccccagaaccgacgcggatttttttcgtgccgccggcgatgtggccgatcagcaccgccgttgccgagctggcaactccttctatattatgatgctccgcaagccaatagcggttatagccccactcctcggcgcggcgcgctaaatccatgctgttgcggaacgattcagcaaccgttcccccctgtacgaccggcgataaattcaatacggaaaacgcagtatctttcaatgtatgttcagccatcgttttctcctttgcggtttagtgtaagcagatcttaaacaaggtctctaccacacaccttaccacagcttttcccgtgagttaaacaatttgattcgatgatcttcgaacaatcagtcagcggtcgtcactagtgaactctgtatgaatgaatctattacattcagatatgatgagcttttcatcctataaaagtgaaaatctatcgttgaaagaacaaacccaataatgttaagatatgtatgatattgaataggaaggaagtcattgtctatatgcgtaaaaaaatcttaatggcactcacaacagctttactggcagcaatcttctttacaggaaacaccgataaggcatatgccgcagacttttactccggcactcagcagcatttaaatgtaagcggatttaccgatgcctcctactacacgaaaaaagcgaaaagtgtcgattttactctcagtacagcgtatccgtcagatcgaacttttaaaggaaacctatacttacagcgaaagtccggaaagaaatggacgacttgtaaaaaaacaaccttttctttctcagtaagggtgactaagtcattctctttaaaaggatgcaagacaggttattatcgtgtcaaagccacgttcagcggttcaaaacttgtcaatacgacaaattcttttaaaattaaccgataagattcagggccctatgattattagggtctttttttattcgttctttgtgagttcctgtgcgatttgaataaaaagttttgccgccaatgaagcctcctttacggacggaacggcaagcagaacatctcggtacaccgcacgattgagttctcttgtcacgacattttccggcagcgatattcccgacatagacatttgtgataatatcgcaattcccagcccctctttgatcatgctgatggacgtattgacgttgtaaacagtgaatgcggcagtcagcacagatcctgcctccttaaacatatcaataaacggtgattcgtatcctccgtcacagatgatcatcggctggcggtcaagatctttcagagtgattgactcacagctgcaaagcggatgatcatttctaagcacgactgccattttatcttttttcagcggcagatattccatgtcttccgtaggaaaaagagtgatacccacatctattacccgggagcggagccattcctttacttcgttaaccgttccttcatgaagcaccaactcaagcttcggataccgttttttaaacacgctgatcagctttggaatgaaataagcggaagcggccggaaatgtgccgatgtgaatcgttccctgttcaagccctctttccgcggccgccagctgctcggctttttctatgcctttgagcacctctctgatatggacgagaatttttccgcccgtgtccgtgagccttacgccgttgcggcgctcgcggatgatcagcttgatgccgagctctgactcaagcgcagagatggcatggctgacagcgggctgcgtcatattcagcgcctgccccgcttttgtaaagcttcccgtttcagcgatttgaacaaaaacccgcagttgtgtaatcgtcataacgttttacttatgctccttataaaaaagattcattttatttatcttactgattaccgtatcatatgatggaattgttctacaaggagtgaacgacgtgaaacagctttcgaaaatacagacggctcttatgctggcgtttctagtcacggtgtggggaattaactggccgctgacaaaggccgcgcttgcctattcgccgcctcttctgtttgccggaatccgcacgctgatcggcggacttctattattaatggtggcgctgccccgttttaaaaagctgcgttttaaagaaacgtggccgatctatcttatttctgccattttaaatattactttattttacggcctgcaaacggtcggcttgaattacctgcctgccggcttattttcagccatcgtgtttttccagccggttttaatgggcgttttttcttggctgtggctcggggaatcgatgtatcctttaaaaatagccggtcttattctgggctttgccggtgtcgccgtcatcagcgcagccggtttcggaggccatatttccattgccggcattcttttggccttaggctccgcggtcagctgggcgctcggcacggtatatgtgaaaagaacgggcggacgcgcggactctatctggatggtcgctcttcagcttttgatcggcggcgtgctgcttgtcagctccggccatttttcagaaagcttttcagcgattcaatggaaagctccgttcattctcagccttctgttcatttcagtttttgttatcgcgctcggctggctcgccttttttacgcttgtcggttcaggggaagcaagcaaggttgcctcttacaccttcctgatcccgctcatatccattgtcgtcagctcgatattcctgcatgagccgctgaccgtcagccttttagccggactgcttctgatcgtcacaagcatttgttttgtgaatataacaccgaagaaactgaaaacacctgctctggccgcagaaaaaaaggccgttcattaaaaaaactcttgccgcggggcaagagttttttatttattgacgtctccctttcacgagatacgcagccgtaatgaggagatagatggccgcagtgatgcatgtgatgacgatggatgtcgtcgcaattacgccgatcaggatggccaaaagcgcaagcaccgcaaaccatgtcgtgtacgggaaccatttgacgtaataagccggctgttctgttgaatgttttcttgatttcaaatgggcgaatccgataatcagccagatgaacagcacggtatagccgagggaacccatcaaataattaaacgtctggcttcctgcgaataaagaaatcaggacgcctacatataaaaatgacgtacaagtcagaatcgcatagacgggaacctttttcttcgatagttttgaaaagattttcggcagccggccgtcagaagcctgcgtaaacaagacgcgggatgatccgtacagtcccgagttcatagacgagataatcgcaagaagaatgacggcattcataatatggtcggcacccggaattccgatcatcttaaatactatgacaaacgggctttcgggaacgctgttgacttgattccaaggaatcaggctgacgatgatgaaaaacggcagcaagtaaaaagcgacaatccgcgttaacgtgctacggacagctttcgggatcaccttttcggggttttttgtctccgccagcgtgacgccgatgatttccgttccgccgtatgagtagatcacgacgagcatcgccgtaatgacaccccccgctccatgcgggaaaaaccctccgtgatccgttaaatgagacagccccggcgccgtgtgattgccgaatgagaaaaataaaagcagaatcccgcataaaataaagatgacaatcactgtaattttaatgagcgcgagccagtactccgtctcggcaaacagtttcacagaaagcatgtttacgaccgtcaccacgatggaaatgatcaaagccaatatccatatcggacattccggcagccaatattgaatgaaaatggcggctacgaccgcctcagcggcaatattgagcacccacattttccaatagatccagtctaaaaagtatgcagcgtacgacccgagagactgctgaaccaaatcacggaacgtccttgcatgtttgtttctgactgccatttcggccagcccctgcataataaacagcagaatgattccgccgaggaggtaggccagcagcacggacggccccgcttcatcaatcgccgtgctgctgcctttaaagagcccggccccgattgcgcctccaagcgccatcatcataatgtgtctggacgacatcgtccgttttaacgtttgcttgtccttttccatctatcacacgccctctcgcaaaaagtgttcatcacataaaaaagcacgccgcctctttgggaaaagagacggcgtgcctcaggcagccgcggtaccactcttgttgatcccgaatatccggaatccagcttaaaaaccttttaacgaaggtcagccgttaggacatagggaatattccgataattccgttccgccctgccacttccgggcgagttcaaagaacaatcagtccgcgttgcaccaacccgcggctctctttttctgactggattcttttactgctcccgttcacagtgttttatgttaaatgaatctcttgagtttttattttctgaatatagtaacataatatacagtcttctattttcaaagtcaatactaatttttgccgtctattgtccttcccggtcattcgaaagtctcagctgaaatccggacacaaggctttgctttccgggcgccgcgctttccgctttcacctttgtgtttgcgtataaaaacagcgcaagcgcaatgccgaatgatatgacgagaatccatgcttttttcatccaggtgcctcctcactttctatcatcggcggctttttctctttttttatacgccaaattgaaaaaacaattttaaaattctgttttccttatattgaaacttgctttatcataaaagtatgcgtttacattcgagtagggaggttatagcatgacccctgtgaattcaagcagcatcgggaagattcaggcggccagcaaaggtttgtcgccaaaattgagagcgattgcagaccatatcgtgaaggaaccgaaagacgtggttcacctttccatcattcagctggcggaaaaaacgaaaagctctgaagcgacaattttcaggctgtgcaaacggctcggtttttccggctatcaggatttaaaaatcgcgcttgctcaggagatcgttcaggagccggtgcagcacattcatgaagaaatgagccccgacgatgatatcgaagtcatcatccggaaagttttccgtacaaacatttccggtctgacagatacctttcaattattagatccggccgacgttgaaaaagcggtagaaatgatccaccgagcagacagaattgaattttacggaaacggcggttccgggctgatcgccactgacgcgtatcataaatttatgcgtacgggtataaattgcatcgcgcacacggattctcactttcaggcgatgtcggcgggtcttctcggtcccgaaagcgcagtcatcggcatttctcattcgggaagcaacaaggacgtgctcgacgcggtgaaaacggccaaatcgctcggcgccggcacgatcggcattacaagctaccaaaagtcgccgctcacccagatttccgacgtggtgctgtatacatcaacaagggagacggctttcagaacggaagcaatgtccgcaaggcttgcccagctgtcggtcattgatacactgtatttcgccacggcccggctgcggcaggagaaaacgctcgccaacttgcagcaaatcagaaaaatgatcgcgcacaaacgtttgtaatatatatttttcaaaagagaaaatgccgatacagcgggaattgaggcaattttatgaaaaaaattttcttcttcatcgttgatttataaaaaaattattcctataattgactttgtaagggcatacattatcaatctatcttattattcaatcagattaggcgggatatattatgaaggaaacccaagctgttatcggtctggatatcggcacgaccagtacgaaagccgttctgttcggaccaagaggcaaagtgttagccaagcattcggttcactatgatttgatacagccaaagccggcatgggccgagcaggatcctgagcacattttggaagctgttatcggaagcatcaggggcgccgtcacaaaggccggactgagccctgacaatctgcttgcaatcggcatcagcaccgccatgcactcattgatagctgtcgatcaaaacggcggcctgctgaccaaaagcatcatttgggcggacaaccgcagcgccgagcaatcaaaacggattttaaaagagatgaacggttttgatatttataaaagaacgggtacgccgattcacccgatgtctccgctttccaaaattgtgtggatgaaagaacaggacaaggagacattcgcgaaaagcgccaaattcatcagtattaaagaatatattctgcacgagtttttcggaacttatgtcgtcgattattcgatcgcttcggcaacggggctgttccgtttagatacgctttcctgggatgaagaagcgctccggattgccggaatccgggaagatcagctgtcggacatcgtgccgaccactcatcagctgcgcggccttgcgccggaaatcgctgcacggatgggcattcatgcggatacaccgtttattatcggcgcaaatgacggcgtgctcgccaaccttggagtcggcgcgatcggcaaaagcgaagtggccgttacgatcggaacaagcggagccgtgcgttcggtgacggatgcgccgattacggatgaaaaagcgcggacattctgttacgcgctgactgacaagcattgggtcatcggaggcccgacgaataacggaggcattatgctgcgctggcttcgagacgaattcgcttctccggaagtcgaaacggcgaagcggctcggcattgatccgtatgatttaatgattgatatcgctgataaagtgcccgcaggctctgagggattgctgtttctgccgtttttatcaggggagcgcgcgccgttttggaatccgaatgcccgcggaacgtttttcggcatcagcctccgccataaacgggagcattttatcagagcggtgctggaaggcgtcatcatgagcgtcttttcaatcggtgtcgcactgagagatttggcgggccccgcaaaagacgtgcgggcttcgggaggatttgcgagatcgccgctgtggaggcagattttgtccgatacgatgggacgggaagtcctcgttccggaaagttacgaagcctcggcgctcggagcggccgttctcgctttgcacagccttggcgaaatggaacggatcgaggatgttcaggactggatcagaatttctcaccgccatgaaccgaacgtcaaaaacagcgaaacatatattgagctgttttacttatacgagcggctgtatgacaagctcaaagatgaatttgacgtcatcagtgaatttcagctcaaacaaagccgttaattcttctttgaaagggtgaaaaggtcatgttactgtttattgtcattgccgctattatcgttttactcttattgattacggtcgctaaattaaatccgtttatcagtcttttgattacatccatccttgtcggtttcgcaacgggcatgaatctgccggacattatcgcttcgatgaaaaccgggctcggcaatacgctgtcgctgcttgcgatcgtgctggccctcggtacgatgctcggaaaaatgatggctgaatcaggcggtgcggaacggatcgcccacaccctgatcggccgattcggcaaaaagaaagtacattgggcgatgatggccgtcgcttttatcgtcggcatcccggtctttttccaggtcggcttcgtcctgctcgtgccgcttttgtttacgattgcgattgaaaccggggtttcattagtgacgatcgggattccgctccttgcgggactttccgtcgtgcacggattggttccgccccacccggcggcgatggcggctgtcggcatttatcacgccaatgtcggaaaaacgattttgttttctttaatcgtcggcattccgactgccatcatcgcagggccgctttacggaaaatggattggtaagcgcattcataaacccgttcccgaactgttgaaaaaacaatttattgaacggaatgaaaaacgcaagcttccgggattcgcaaatacattgtttacgatattggtaccggtgatcctgatgcttatggcaacgcttgccgaaattgcgcttccggaaaaaagcacgctctatgaaacttttaaatttatcggcgaccctgtcacggcgcttttgatcgccacggtttactcctttttcagccttggtttttatcagggctttgacagagaaagcattttaaaattcagcaatgactgtctgggaccgattgcttccattctgcttgtgatcggagccggcggcgcttttaacaacgtcctgattgattcaggcgtcggcacgtatatcgctgacatggcgaagcattcaagcttctctcccgttcttttaagctggacgatcgcggcggtcatccgtgtcgccacaggttcagcgactgtcgccatgatgacggcggccggcattgttgcaccgattgcatctgtcatgccgggcgtcagcagcgagcttctcgtattggcaacgggagcgggctctttgattctgtcacatgtcaatgactccggtttctggctcattaaagagtatttcggaatgacggtcaaagaaacgttcctgacatggacggcgatggaaacgattatttctgtcagtgcaatctgttttatcatgatcattaacgcgtttatataaaaacaaaccccggccgcaaaccgggggttgtttttttatcggtcattcacgaggatataagcggctttaacgggtccgtggacgccgacaaccaaatccatttcgatatcggccgagttgctcggtccagtaatatagttgatgcaggaaggaacggtgacgccgtctctgatctgctgtttcagtatatcgctggcctgtgtcattctcggcacaatggaagatttcgggatgattgcgatataggtggtcggaagcaggctgacagaacggccggcatgctctgacgcatacaaaacaacggtggctgattccgcaagcgtgatctcgctgaatgtgatgcccacattcgcttgttccgctttttcaatatttttcgctccttgttccgcgtcccattcccaaacgggaaccccttcatccggccactcttctgtcataagggtctgcaagccgtacgtttcaaaccggctgtccttcggaatgatgacaggccctccttcaaagcggttcacctgcgtgcgcaaagcgtcgtaaagcccggctgcatccgtttcgatcagttcggtatgaatgttgacgcagtggtctttcagcatcgtgacaagatcgtcttccgtacagcccgcatgcgtttgatattgaggctgatacttccattcaggcagggacacgcctgatttcctgcgctctctgcccagacgttcggcgatccggtttaaaaaggattcctgatgtgtaaccgtccctttcatcatcattcttcccccttttgtttttcccggtctttaaaccaatctctgaatctcgatttatgcggcgccgggaagtcccgtattgccgtccattcttttaacggccccggcccttttgatattttatcatcttccgtaaacggcgtcatggcggcaggcgcccatttcgatcccattttataaagggacggggatgacgagccgagcccgaaggctttcatcgccagtttttcgctgatcggcgctttgccctctttttccacgatgttctgccgatgcttgagcagcagctcgtgcagcggaattttaacgggacatgcttccgtacaggccgcgcataaggaagatgcgtacgggagctccttgtattcgtcatatccgccgagaagaggcgataagacggcgccgatcggacccgaatagatggacccgtacgagtgtccgccgacatgccggtacacgggacagacgttgatgcaggcggcgcagcggatacattgcagcactgattgaaattccgtgccgagtatgcgggaacgcccgttgtccacaaccacgaggtggaattcctcaggcccgtccgcttctccttgctgccggggacccgtcagcgccgtaatgtaacttgtaagccgctggccgaccgcgcttctcgtcagcatgctgacaagcacttcaaactcagaaaatgacggaacgatccgctccattcccatcacggtgatctgcgtcttcggcagcgcggacacaaggcggccgtttccttcgttcgtcacgagactgaccgatccggtatccgcgatcgcaaagttgcagcctgtaatgccgacatccgcttcgacaaattttttccggagaacgctgcgcgcgtgcatgacgagctcttccggtttttccgtctgtttgtattcgagtctctctttaaacacgtcacggatctgctctttgtttttgtgaagagcgggagcaacgatatgtgacggcggatcgtgatcgtcaatctggagaatgtattcgccgagatccgtttctgtgacttcacagccctcttcctcaagcacttcgttcatattgatttcttctgtcaccatggatttggatttcacgatttttttggcgtttttctgccggatgacatcgcggatataggaggacgcttcttccgctgtttcggcgaaaaagacgtgtccgcctctgttggcgacattttcggcgagctgttccaaatagaaatcaagattgtccagcacatgctgtctgatttcttccgcatgtgaacgccaatcctcccagtttcccaattcttcggccgcctgcagccttcttgtcctgagccgttcctgcgctccggagacggctcctctcataaactcattatctattccttctgatacccgctctttaaaagcggcggtaccgattttcatcgccatgattttccccccttgttgtttctcgtgttatctgctgttcagcacttcggcgatgtgcatgactctgacgtttttatccttacggtcaagacgcccgccgatattcatcagacagccgcaatccgctccgatcagcacctcggcctccgtgtcttccacgcaggcgaccttctcatccaccatttgttcagagatttgcgccattttcacagaaaacgttcctccgaatccgcagcattggtgctttccgggaagcgcggtcagctcgagccccttgacatggcgcaaaagcttcatcggctcctccgacacgccgagcagcctcgtcatgtggcacgatgtatggactgtcgcttttttatgcagcaccgccccgacatcctccaccccgagaacgttgacgataaaatccgttaactcatatgttttgtccgcaagctgctgcgcttttgccgcccacttcggatcgtcctgaaacagatgcggatattcacggaacatcgtcgtacaggaacctgacggactgacgacgtactccgcttcttcaaacgcggcaatcatccgcttcatcgcttttttcgcatccgtcacatacccgctgttgtatgcgggctgcccgcagcaaatctgcccctcgggaaaatccacctcacacccgagccgttccagcacctcaaccgtcgcctttccgacattggtctggaacatatccacaaggcacgtgacaaataatgagactttcatgatgaacccctctttcatcctcaatatgtgatccggtcatctgatgacctgtttttgggaaagctctatgaatatcctacactattctgaatatggattggaaggtttttctgaaaaatcctttcgtccgatgcgctgaaggggacaaaaaaagagaagcccgaaagctcctcaagctgctctacatcccgttttccagcagacgtcccagtttttgcacaccctcttttatcgcggctttaccggcataactgaacgacaggcgaagatattccgcaccgtcttcctgatgcagaaaaaaatatttaccggggacataggaaacgccgtgagaaagagccctcgccagcattgcggatgtatccgcccccggcactttcacccatacaaagtaaccgccttccggcacatgccaggatgcggattccggaagatatcgcgctgatgcggcgagcaaaacgtcacgtttgctttgatatgcttcccgcaaggcggcgagccgtttttcaacattcgtttgttccagatagacggcagtcaccgcttgggaaaacgggtggcctaagtctttttttaaccatgacaatgccgtgatgaatgcggcgtcccctgcaatccagccgatcctcatacccggggcgatgacttttgataatgaaccggcgtacagcacccggccgttttgatccatggctttcaagggcggcggaatatcggtgaatccgagctcgccgtatgcatcatcctccaagatgagaaaatcatacgtttcggcaagctgaagcaggcgggttctccgcttcgctgacgttacggttcccgcaggattctgaaaagcgggtatcgtgtagagaagacggggaagcagaagcccttttcgttttctttcctcaagcatgaacgctaatgtttctgtttgcaggccctcttgatctgtcggaatgctcatgatatgcggtgtgtaatttttaaaaatctcgagcgcttccatgtagaccggagcttcaacggcagcggcggtttgttcatcgaggaaaacacgtgcagccagatctatcgcctgacaggcgccggaagtcacgagcagctcatcgtcccgacagtgaatgccgcggatggctaaccgttcttgaatctgcttttttaaaacggccgtcctcgggcttcccatataatgcagcggcagatcgcgctcctcatccagaaggcgggcggcggcttctttcagctccttgtcaggaacgagtgcgggatcgggatagccggaatgcagggggatgcacgctttcggaactgccggcatccattccccgggaggatcgtttgtcagagctttctttacatggtcggaaaaaaaagattcggcctgcatgtgatgttatcccctttcacaagtcagcttctatacattttcttcaaaataagcccccagcacgtcttccacattcgtcaggtgcgccgtcatcgcggcttccgcttcatccgcgtctttggcggcgacggcgctgtaaatgcgttcatgctcttcatacaatcgctgcacgctcgttcgtttagaaaacagccaaatttttctcgtttctctcatcgtttccaaaaggagcgcggagacatgattcatgagatgcttgagcagcccgttttgtgatgcttctgccagcgccatgtgaaaggagaaatccgctttttcgcccaattcttcgtctccgtcaatgtctttcatctccaggagagcttggcggattttttgtaaatcgtcttcggtgcgtttttcagcggccatggcggcgacgccgagttcaagcagctttctgacttcgagcagctgtttgacgtcctcttttttcatcaaaagggcggaagaaagcggctgggaaacatgagacggctcaaattctcttatgtatgtgccttctccctgcttcatgtcgacgagccccatcgctttcaaagccgacagcgcttctctgaccgccgagcggctgacctgaaaactctcagaaagcgcctgaacggaatcaagcttttcacccggcttaagctcgcccgcttttatcttctccagcaatgcgtcagcgacttcctcgtagatttttttcgttttaatttgtttatatttcaacgcgatcaccccgtcacttgtgaatcttgatgtttatcgtctattatacttctttttttgtattgccgacaggttcagacaatttgttcaagaaaagtattgtactttcaaaactttcaaaatataatgctaattaacccggtcatcagatgaccttatcataaaaagtaatcgcttacatgacataaggaggggttttttagggatgcaatggacacaggggtacgctcctttagggggaaatttgcttttatcggcagcttgcgcgctcgtgccgattatcttctttttttgggcgcttgcggtgaaacggatgaaggggtacatagcggggcttttaacgttagccgtttcacttttaatcgctgtatttgtttacggcatgccggctgaaaaagcggtgatgtccgcttctcagggagcggtgtacgggctgcttccgatcggctggattatcgtcacatcggtctttctgtataaaatcaccgtgaaaacggggcagtttgagattatccggagttcggtgctgtcaattacagatgaccggcgtttgcaggcgctgctcatcgccttttcattcggggcgtttttagaaggcgccgccggtttcggcgctcccgtcgcgatctcggccgctttactcgtcggacttggttttcagccgctgtatgcggcgggaatttgcctgattgccaatacggcgcccgttgccttcggcgcgatcggcattccgattaccgccgtcgaaggtccgaccgggataccggcaatggaaatttctcaaatggtcggccggcagcttccgtttttatccgtctttattccgctgtacttaatcattttgatgagcgggtttaaaaaggcttttgaggtatggccggccattcttgtttccggcgtctcctttgcggccgtgcagtacgcaagctcgaattttttagggcctgagcttccggatgtgctgtcggcgcttgtttccatggccgcgctcgctctgtttttaaagttttggaaaccgaaaacggcctttcgtttcgcggcagaacgggaatcagcagcggccgctgaccgggcgccgatcaagtacgggggcgccgcggtgtttaaagcgtggtctcctttccttcttctgacagccatgatatccgtttgggggattcccggcgtgaaggctgccttaaccggtcattacgaaggaacgtcaatgtggctttcctggctgaatgcagccgggcgtgcattgaccttcacgcctcccgtcccatttgtaaatcagcagattcttcaggcggacggcacgccgattgaagccgtgtacaaacttgagcttttcggttcagcggggacggcgattctgattgccgccgtcatctccaagttcgccctcggcatgtcgtggaagacatggggcgaagcgtttatagaaacggtgaaagaattaacgcttccggtcgtcaccattgtttctgttgtcggctttgcttatgtgacgaatgcttccggcatgagcacgacactcggtcttgcgcttgccatgacgggcgcgatgtttacctttttttcgccggtgctcggctggctcggcgtatttattaccggctctgatacgtcggccaatctgttgttcggcggattgcaaaaggtgacggcgctctctgtcgggatggacccggttctctccgttgccgccaattcatcgggcggtgtcaccggaaaaatgatttctccgcaatccattgcggttgcctgtgccgctgtcggtctggcgggcaaggaagccgaccttttccgctttacgattaagcacagtctgtttttgcttctgctcgtctgtctcattacatttttacagcatcatctgttttcatggatgatcccgtaacacggagaacctccccggggtttggctcggggaggtttcagctgtaccgttttctcgccgatgacggcggaatatttaattggtcacggtacttggcgacggtgcgccttgagattcggatgtcatattgttcatgcagcagatcggcaagcttttggtctgaaaaaggtttctttttatcttctttaccgaccaatgcctccagatgcgcttttacggcataattggaggcgccgccgtcccccgacgattcagctttcgccgagaaaaatgttttcatttcatacagtccgtacggcgtctgaacgtacttccctttgatggcccggctgatcgttgattcgtggagctccagcgtttccgccacctctcttaaggtcagcggctgcattccgctttttcctgtgagaaaaaaggattcctgccgttcagtcaggacgccgataattctcgtgatcgtttgttttctttgcgacaaagcccggttcagccagcgccattcctgatattttgccgacagataatttttcgtgtcacggcacccggcagctgacaagagcggctgataatgggtatgaagctggatgtcaggaaacgaacggctgttgagccgcgcttgaatgatgccgtttttcactgtgatgaaaatatccggttccacgtaaaaacccggctcctcatgcgcataacggagccccggcctcggatcaagggcgctgatcatgtcagcgatgtcctgaatgtctttaagcggaatgcccgtttttagtgtaagcgctttccagttctttcttgcaaatagctcaaaataggcgtcggcaatccattccgcctgttcgttccgctcgggaagacggcggagctgaagaaggatgcattcctgcaaagacctggcgccgattcccgcgggctcaagggattgaagctttttcagaaccgcttccgtctcctcttgtgaagcggatacatggtcggcagcagctggtatgtcctcttttaaatatccgtttgagtccaatgaatgtatcagataattgaaaatctttttctcatcatcggacagcttcatgtctaaggcttgctgtttgagcgaatcctgcagtgttttgcgggtaagtctgatctgctggcttccgtcccgttctttcatcctgtttttacttgttttatggtaagatagtggcggcgtgtctgtttcctttcgttcaatcagagggttttccagtgagagctcatcaatatatccggccagttccgcggaattgtatccgagtaatgtgatagcctgtttaagctcttgcgttaattgaggctttaacatttgtgtttgctgaagtttgatatccatcatgctcactccccttttttcattgtacatgattggtttcataccgtatatacttattaaaaggagttgctttatagatgtcagaacttttttctgttccttattttattgaaaactttacacagcacattgaaatgaatccgaatgaagaccgaattcatgcgatgaacagctattaccgctccgtcgtctcaacccttgttcaggatcagctgacgaaaaactcggttgtgctcaaaagaattcagcatttggatgaggcgtacaacaaagtaaaacgcggagaaacaaaataaaccttccgctcattcaaagcggaaggttttccttcgtgccggcggtttccccgatcagacggacatccggcgcttcgtgcatccaggtgtaataatagttggcgtttttcccgtatgaattatcaatgacggtattcggtttcccgagaagcgaggacagaatgtggccgtgaagccttgacgtttccaccgattcgtacctgctgaaaaacaggaccgctttcttcgttaagaaatcggaatagcgtttccaaaaccgcgcaatcggcagcgggtttcccgcttttttattcaaaacattcagcgtttggaaaaaagcgattcccctgcggtcgcttgctgacagcacatcctgccagtcgcagcttttaacggaagaattgatttgcagcttcggattgatttccccatccgtgcggataaaatgaagcctgccgcgtgacggagccgctgacgccgccatcggatacagctgatgggccatgtcaggcataagcccgatatgattcgccgaaaagaagtgttttgcagtttcgtatgacacatgatctctcgtaaacaggtggagatccttgtgctccgcaaaaagcgccgatgtcttctcaagccgtgtctcatcctgataatagatggattgcggcaggatgacgatcctgttttccggaaaggatttgacgattttttccctgaacgtctgatagtacggatagagatccccgaaatttccgccaccctgacagacgatgatcgtctttttgtccgcccggcgcccgaatggaaaattgtcgggattccagcgctgtctgacgcggatgccgtgcgctttaaaaaacgcctccgtccctttcataatcaataaatcccctacatttccgtagaggggatagtcggcataaatgatgtcagattgcggcggtataacgctgagcagacccgtcagcgtctcttttaatcggctcataacatggcggctgtccatgttttctcccctttcgtttcaaacagtcgcgcaagtgcgtcaatgacacgctgctgctcctcagaagacaagtcagacccggacggcagacagatgccccggctgaaaaggttctcagagacacgctcatgttcgctgtgaggataaaagacggaagatgagaaaagcggctgcgtatgcagcggtttccacagcggccgggcctcaatgttctgttccgcaagacaggcgacggcttcttccggcgtcacgccgttatcaagcgtcagagccgtcagccagcggtttgaaaccgttccttcaagctccggcatcatgcggatgcccggatacgtttccagcgcttcccgatacctgtgaaagatttctctcctcgcccgaacgcgatcttcgagcacttccagctgcgatatccccacgcccgcgagaatgttgctgagcctgtagttatacccgagctcgctgtgctggtaatgaacggcggcatctctcgcctgggacgcaagaaacctcgctttttcaatcgcggcttcatcgtcagacacgagcatgccgcctcccgatgttgtaatgattttgttgccgttaaaggaataaatgccgaaacggccgaacgtgccgctctgcctgcctttatatgttgatcctaaggactcggcagcgtcttcaatcagacagacgccgtatgcgtcacaaaggctcattaattcatccattttcgcgctttggccgtaaagattgacggcgatcaccgctttcgggagtctgccgcgccgctttgcatcccgcagcgcccgctccagcgcatcgggcgacatattccacgtctcccattccgaatcaataaaaacgggttcagcctgctcatacacaatcggattcgccgtggcgacaaacgtaaaggaaggacaaaatacaacgtctccttttttcacacccgcaagccgcagggcaagatggatggcggccgtccccgagcttacggccgccgcgcttttcactcccgcatattccgcgagccgcgcttcaaacgaattgacgagcggaccgagcggggcaatccaattggaacggaaggcttctgcgatgtattcctgttcttttccgctcatatgaggcggagacaaataaatccgtttgtttgtttgcatgaaatcatcctttttcattatggataggggagatgacgcgggccggaacgccgaccgccgtcacatggccgggaagccggctgatgaccgcagcccccgcgccgataacagaccaagggccgatgtcaatctgcggtatgacggacgctccgattccgatgtgcgttccttccccgactttcactccgccggcaagcgccgcgcgcggtgaaagatggacgtaatctccgattgtattgtcatgatcggcaaccgcccccgtattgatgatgcaatgggcgccgatgtcagcgcccgcctgaatgacggcgcccgccatcacaaccgttccgtgtccgacggaagccgtttcactgacgatcgccccggggtgaatgagtgcggcataatcgtcatcttcaagcccaagcgtttcagcaagctgctttctgacgccgttgcggccgatgcatatcgtgaatacggcctcggggacgagtttccgaagcatgggcacgtctttcgtccggcccgtatataaaccgttccgaacggcaaaaccgctgaatccgtcatccaatatgcccgcaagctccatatcggaacgggcctgcacgatttccttcacgacttttccgtgtccgccgtttccgatcagcacgacctttttcacgatgacatatctccgctgcctgtgaagcgctttgccgtcacatggccggcttgatgtatgccttctgacacgagaacttttttcactgttaaaagcagaatctttaagtcgagaagaaatgtgcggttgtcgacgtaccacacgtcgagcttgaatttttcctcccatgaaatcgcgtttctcccgttaatctgcgcccagcccgtaatccccggcttcacctcgtggcgccgcgcctgctccgccgtgtaaagcggcagataatccatcagcaaagggcgggggccgacaagactgatatctcctttgagcacattaaaaagctggggaagctcatcgatgctcagttttctgatcagccttcccgttttggtcagacggagatgatccggaagcagcacaccgttttcatcacgcgcatccgtcatcgttctgagtttatacaacgtaaacggacgaccgttatgccccggtctcgtctgtttgaacaataccggagacccgatggcgcatctgacggctgccatggcgaagagaaggatgacgctcgcgccgcacaataacaacatcgcggccgctatatcaaatacacgtttcgccttcaaatctgaacagctcctttcacttttcggcatttctgtaaagcaagccgcctttcttctttcgtacaaatgaagaaaaaagcgaatgcggcatagctcatgcatacggcaagccccgcggcgatcagaccggcccagctgtcaagcggtgaaaacagccggataccccggcagacagcccaggcaaatacggccgccgccaacgggccgaacattcctttgtaaaacgcggttttctgaaaaccggtaatatgcgaaacatacagcggcgtgaagacggcatttttcaaaatgagagagactgcaccggcgatggtgatgccgtacagcccgagatgtgccggtccgctgagaaccacggccaatatgacattcagtccgcctaaacataaagtaacgacggcgggcgttttttgtttattaaaagccgtccatacgtaaaaaagcggcatgacagagagactgaccgccaaatacccggcgtgaatgtataaaagcggcgccgtctgcacaaacgacgggcccagccaaatcgccagaaacggttcggcaagccctcctaataatgcggcgggaagcgcgagcagaagcccgttcatccgcacagccttattggcgtaagacaggagaccttccatatccccttttgagtaataggaagtcaaaaccggcgcaaacagtgaagcaagcgtccctgcaagacttctgagcagaagcgggaattgaataatcgccgcatagacacccgcctcagacggccccagcacgaggttggccgtcatgaggtcaatctgcagaaacagcagcacgccgatctggttgacagaactccaggcaccggccgaaaacagcactttgctcgtctgtaatgacaaggttttacggctgaaagaaaaccacggaatcaatttcttaaagaagaaaaaagtcagcacggccgcacagacggctcccgctaatgccgaaagctggatctgccagattttcggcggcaggcacgtaaacagagcgagcacacacagcaccctgaccagcatttgcacggcctgaatggaacttgtgatataaagcttgttggcaaaaaacggccccgttgcgaaccccgccataaaaaacgtcagcataaacagcacgctgccgatcacgatagagagcctcacatccgttaagagcccggccggcacattcataatcttgtcaataaaaaaagcagtcccggcgagcggcacagcgagtaatagagatatcacgacagacgcggctaaataattgcttacatacgcattggcctcatccctgttccccctgtgggcggcgacggagaaaaacctcacaacgacagagctcagcgcaacggtaataatagagaaatagttaatgatattctgtgtcagatggacaaatccaaaagcctccacacctaatgttttcacaataaagggcgtcatccacactgataaaaacaccgatagtaaaaacgccgtcacattggcgccgaaattaatggcaaatttcatgctccttccgcactgcctttctctttcgatttccgttcgaaaaacgcatgcagaagaagaggaaggcgcattttgcacaggccgagcaccacgcgctcccccgccagcagctgtttatggcggcacggcgtcctgcgcaccgccgtttttaccatgtcatacgttaagattctgccgatgtgcgccgtaatctgatgtgacggctgcggggcggcgcatgcgttggcgatcagcatcggaatctgatgcttgcacaaatatgtattgatatcgctccggcaggcgtccgtcagcccgttttcctcataaaaagccattttcgctttatattgcttttgcagttcgtgatctaagtggggcttaaacggtgtttctgtaagactttgcggattttcccggtagatatacagcccttcgtctatcactttgatacgcgcggcttggcggaacgctgccaaattaaacggagagtcttcggcaaaccggatatcttcatggaacaacagcccttgcaatgcttctttccggtatatatagcgccacacataccaaataaaccgatgttcgtgcgcacgggtcagcaatgcagtcatttcatccgctgtgaagacgcgacccggcggaagggacggcggcatatatgttcttttcttagacggcgtttccttataatagccgcatccggcgatatccagccggttcttctccgcttcttcataaagccgctcgaacatcgtttccgtcacatagtcatcgccgtccacaaaaccgatataacggccgcgggcggcttttattccggcattgcgggccgagctgaggccgccgttttctttatgaatcacccggattctcgcatcttctgcggcgaattgttcagcaatccggcctgaccgatccggtgaaccgtcattgacgaaaatgatttcgatgtctctcagcgtctgttttgttaaagaaaccgcgcattttttcataaaaggctctgtcttatacatcggcacgatcacgctcacaagcggcgcggtcattgggcatcaccgctgattttcgagcgcagcccggcaaaataaacactgcgcaaagaaccgccttcctcatgcttgccgctgagcagccggtttacggcggccgttacggcttcagggtctggacgttcaagcaatgtcatgttcggtatgtttttcagccattgatagccttccatcactttatgatcaaacgaacgaatgacgacacaaggcgttttcgtcagcgcacaaaaaatcatcccgtgaagcctgtcagtgacgacggcttccgcgcctttcagcgtattccaaagctcttccagctccttttcacgtgtatggcggctgaccctccggccgaccgtcgtggtaaaggaatgcagctcgccgtactcttttgccaaagcttcttttaccatcgttctgtcctcagccgtcagcgcactctccttatcctcccgtaaacagaggtagatcccttcccgcgggatgcgccgctcgcttttatccaaatataagaccatgtcaggctgtttgagcactgtttttccgggaaaatgacgcttcatccattgatacgtcgtctcatctctcgccattaacaaaaggtcgggatgcgcattgtacacttttcgggcgcgcttcagttccttccgtcccttttttgattcagaaaagtgagccgtcgccggaagctgaacgatccgatattcccggaatgtttttatgataaagcggcgtgtccattcctcataccggtacaaatcccccatgttcccgccgccgatgatgaataccatatcatcggggtggcgctttttgatcagcgcttttgcggatctgtatatatccttcatatccacctcgacaatgtcaaaatcgggatactcccgttcaagaaacgttttgcttgcgtaggcgatggcgtgatcgccgagattatcgtgggacgggagcagcgtcagaatgatcttttttcttgccgctgtaagccccgccccatccgctgccgttccgaaatgaaattgggacgggtatttgaccttaagcaacagccattccgcgagattgatttttaaagattgtatcgacatgtcttcaccctctgattttcattttgtactcgattgcccgctgatacgcggctgatgccagcgacacgaacggaatcagcttcagcttcgccaaaagcagaaggcatgagcgtttggcgtcaaacggcgccgttccggttttggaaaggctcaggcgaaacacgggatcagcgcatatccggctgatattcttccacttctcagaaaaccggccgccgttattccgcttccattcattcagcaggcagactgttccgtgctgaacgatgaaaaaatccagctcctgccggtattcctgtaagcagccgttttcacgcaaaaaagcctcgttcagccgatagagaacgagacctgagtcaaacagctttttctgatagctttgcacaatggaagtcaagtgaatccgataatgatagagcggctgatccacgtacgagaccgcacctgcgaaaacatgcgcccggaggctgaagtactgatcctccacgtgctccagctcatcacgaagcggaaagcgcagctgataatgctcgatcatggttcttttgtacagcttgttccatgaaaaaccgctgactcttccttcaaataaatctttcaggtacagttgtttcgggcggcccgcgtacgctgaagcgatcgttgaaacggcggttttccccgtatccgcaaattcggccgcatattcgcaaatcacgagatcagcctgatcagccttcgctttttcatacatgcgcaggcaataatcaggttcaacccagtcgtccgcatcaataaaagcgataaattcgccgcgcgccgcctcgatccccttgttgcggaccgcgccgagcccccggttttgctgatgaatgacccggattctctcatcccgcttctgataggtttcaagaatcgccgggctttgatccgttgacccgtcattaacggccacgatttcgatattggcgagcgactgattgagcaatgaatctaagcatctttctaaataagtttccgtattatacacagcaattaataaactgaccgcgggtgtttccatataaacctccaatatccattaccgggaaaaaatcgttctgtacggaagcacagacgaatcgaccggcataagcaagtaactgtaaagaaaataacagacaataatggcgatataaatcagcgcatttgatttttcatcaaaaatcctcacaaaataagggatcaggatcatttggtacaggccgaaatatatattaaaccgggcgaaaataacatcctttgtcgccaaaagaccgaagagcaagccgagcagacagaaattcacgatgacatcaatgtcgggccagagcttccgcagccgctcccgatagcagaaagccaaaaacagcggcagaagcagcaccgcgatttttacgacgttcatcccgttcgtattggtcatcagccatttctcataatggccgtatgagctgttttccagcacgacgacaaaaagcgaaatgaacttctgatacagaaacgtcataagaagaaacaatgccgacagtccgaaaatcgcaggcgaccaggctctttttctgacgagaaaataaaccggaatcataatcagcgctgaggaatgaaaaagcgaacacagcagcacgattgacatataacgcttccagcttccgctgatcacgtagcggacggcccaaaacaaaacggccgccaccatatactgcctgatcccgttaaaggaagcgtaatagtgatacgtgcccaaaaacaaaaacacactcagctcaaacggacggccgaactcaacgagcccctttaaaataaagctgcacgtcacgaccgccacggtgaaatacatgatttgcggatctttcgtgataaaattcatgagccagatgagagccgtaaaccccggatcaacggctgcttttttcgctccgaacccgaagatctcccaaatgcttccgtaatttcccgccagcttgtacatcagcgcgtacgtctgaaaatccgtcccgactctgtagcgcaaaccggagaccaatacgagcgatagcagcggaacgatcatgacgagctgattcggccggtatccggtcgaaagcgattgatcacgcccgccgcacattttcgcgaaccatgaccaaatatacacaattcccatattgactacatatacaatcattcgttactgttcctttttccaattcatattgtaaagcttcataacagcccccgcattttctcccgcgtcatatccctgccgtctgagggtttctttaatgcgctccccgtcaggctttgccgcctctgctgcccgtaaaaccgcggatgcccattgtccgggcggttctttgaggctgagccttttgaccagcccgagcccggcatcggcttcttccgttatgccgtctgatattacgcacggcaccccggaggcctgcgcttcaacgagcgtgacgggcagcccttcataaagagacggcatgacaaatacatccagcgttttcagcagggcatgaacgcggtcttctatgccgataaaacgcacatcatcatcaagccccagcttcgccgccagattttccatgtcggtgcgaagcggaccgtctccggcgagaatcagctgtaaaccgatgccccgctctttcatatcagcggccagccggagcagaaattcgtggtttttttcttctgtaaagcggccgatatggccgatcaccaaacggccgtctgcaatgccccgcttccttttttcagcttctgtatccgcgcacccgccggcaaataagtcgagatcaatgccgttcggcaaaagatgcacgtctttttctttcccgaataagaaacggcccgcgtcttctccgcaggcgcacagtgccgtggcgtttacggtaatcagccgtctgaaaacaaacagctgcatcccggcaagccgcgacgcccgcccccgccacgacgtactgtgcgaatggcagatccgcaccgggacgccggctaaacgagcggcaagcgcgatgaatcccgactgaaaatcggtatgggcgtgcacggcggcaaacgggcctttttcctgaatcacccgcttgacctgtttcacaaatgtaatcgggtttgtgctgccgatgctcggcacataaaaaagccgtccgccgagagcgagaatttcctcatcataagcgcacggatcgttcctatgggttaaaaaatcaaactgcaccttcgttctgtccatcttccggtacaaattcatcatcatcgtttctgcgccgcccctgttcatcccgctgaagatgtgcagcacccgcatcggtttgtcagtcatgttcggcaagcccttctttttggcggatgtccctgtttttatgataacggttcatgaccgcgggcggcgtaatggcgcggatgagcggttttgcgatatacgcgtaatgggaaagcggcagcttcagccgtctgcatgcctgaaaaacgaggaccgcgttatcaatggaatacgtaaacgatctccttttaaacgcatcactgtcctctctgactctatacagcgtttcttgaagattgtacccccggaaacccgcttcaaaaaagcgcagccacaaatcgatatcctccatccgccgcgtccgcctgactgaccggtagcccccaagcgctttgtacgcttcagcccgcatcataatggtgccgtggcagaacggtgtgcctttcgccataattcccggtttcggcacgggcggcaaaaggcgggcgccccttacaccgaattcgtcaaatacgagcatgcccgtgcctacgacttgatagtgggcgtgcttgtttaagaaagcggcctgtttttccagtctcctcgggttggagatgtcatcaccgtcctgcctggcgatataatcccccgttgcgtatgtcagacagcggttcagcgaagcggcaagccgttgatttgtcttattttgaatcagcgtaatccggtcgccgtaatgatccgcgtaacggcgcgcaatctgatacgttccgtcagttgacgcgtcatcacacataatcagttcccaattcttataagattggctcaggatggattcaatactctccgctaaagtctcttcgcaattataaattcccatgatgacggaaattttcggttgtgctcctgcattcatacgcttttctcctttttatccatataaccggcgtaaatgtgcgccatttcctttaccgtacgtgtttcagaaaaacattccgccgtgctgcgccctttttgccccattgcttttcgcagacacggggagcggtacagcttttcaatccgatcggcaaacgccgcgctgtccccggccggcacgagaaaaccgttcacaccgtcttcgatgatctcacggtgtcccctgttgtccgcggcaacggccggcttttcggcagccatcccttcaagcagattcatgccgagcccttcgcggatgcttgaggcgacagacagatcagcaagctgaatcagttcatgaatatcgcggcaaaaaccgtaaaaccgcacaatgtcagatacaccgagtgattcagccttttttctgtacggctcttccatcgcgccttctccggcaaatacgagtttcagctccgggatgcggttcttcagcagtgccgcagtctcaatgagaagtccctgatttttattgccgtttaattcagcggggtatacgagaataaattccccggcgccgaagccgtatttttctctcagacgttcactctcttcccggctcacagggcgaaacctgtctgtattcaccccgatgccgtgtatttttttcgcgccgcaagctgtttttttcatttgcttggcccgttcgtaatcctcttcattaatcgtaattaaacaatccgtgtaagaagaaagaaatttttcgatcgggtaataaagaagccagtttttcaggggcgctccgtcgcagaagtgaaagccgtgcgcggtgtacagcacctttgtccctttttggcgcgcttgtctcgccgcaaggcgtgccagcacgccgccgaccggcgtatgacagtgaatcatgtcgtagccgttgtcctgaatgagccgtttcagccgcctgtaaacagaaagattttcgggatgaaacggcgagcgccgaattggaatggaaaacttttcatcaacaaatggaagattcatattgccgcctgccgcgacgtgcacctcccaccccatatcctgaaaccattgaaaatacgggagatgaaaggctttaaaatgataatcgacagtggcgcagaataatacttttttcgtcatctttctgtcctcccatcacacgcctgcggccgcttcttcatgtactgattcgatcgcctcaaacagcctttttctcagctcttcttcaggcagacggctgaattcctccataaaacggatgagcacggcccaattcccgtccaccgctttcccaatatggattttcggaaaaatctgctccgtatgtacttcattatgattcagcaattcttcatacatcttttctcccggacggatgccggagaattcgatgggaatctgttctgtcgtatagcctgataaatgaatcaggttttttgccagatcgacgattttgacgggttctcccatatcaagaacgaaaatctgccgcccttttgcaagcgcccccgcctgaatgacgagtcttgacgcttcgggaatcgtcataaaatatcttgtcatcgccgggtgtgtgacggtgacgggtccgcctttttcaatctgctttttgaaaatcggaatgacgctgccgcggcttccgagcacatttccgaaacggacggcggcgaatttggtgcggctgacctttccgaggttcatgatgaccatttccgcaaaccgtttcgtcgcgcccatgacattggccggattgaccgctttgtcagaagaaatcagcacgaatgtttccgttccgcacatgtcggcggcttcggcgacatttttcgtgccgataatgttgtttttaaccgcttcttccggattatgttccattaacggcacatgtttatgggcagccgcatgatagacgacgtgcggctcgtattttttcatcaaagtaaagattttatctctgtcctgaatatcggcgatctccgcgtgaaagagcacctctttgccgaagcgtgcggacagctcggtatgtacggaatgaatgctgttctccccgtggccgagaaggacgatttcccgaggaagaaaggcgctgatctggcggcagatctcagaaccgattgagccgccggcgcccgtcaccagaatcgtttttcccttgatgctgtcagaaattttgctcgtatcaagggtgaccggctttctgccgagcagatcttcggcttttacatctctgatgtgtccggcagcctgcgttccgagcaggatctcatcaaattgcggcatgattttaatatgggcgcccgtctgcacacattctttgtataacgtctgaagctcatgggtgcaaagagacggaatggcaatgataatatggtggattctcagcctctgcaccgccggcataatgctttcttttccgccgatgacgggcaggcccatgatttcgagcttatgcttcgtctgatcatcatcaataaaagccacaggcatgattccgagatcatttttctgggtaagctgacggacgagcagcgtcccccccgcacctgcgccgatgatcagcgcccgggaagagtcattttgcttcctgccgatcgtttctttcagcacccgggaaatcatccggcttcctccgatgaacaatagctgaaccatccagctgacggccaacagccggaacaaaatcgtgtggaacaccccgtattggacggccgccgttacggctgctgacagcgtgatccccttcatcaaggcaagcagctcgcctattcccgtgtacgtccatacctgcttatactggtgaaacataaaagcgcatacatgatggctgatcagcatgctcacggcagtcagcagcaacgctccggagtcataaaagtgataagaatcctcaaaaaattgatatcctataacaacggaaagtaaaacgagatacgtatccaatgcaaaaatcattgaaagtcttctccggtaagtcaatctttcccctcctcatttatcggtttagctgatacggttttcgtaaaaacagacataacagctaagccgataacaatgcatcatcttaagataaaattgggcatttaacccgtcctcacaccccgccaccgacgaccagcatctaaggcggcggaaaacgccgcccacagcagagccgagtgcctccgttgataaaggtaaggagacatcacctgcaccgctcaataagagtagtgctccgtttttttgattttctttttattcagcagcgcccccaaaagctttgcctttgactgctggagcgcgtctctcgccttttggacggtatccattttcgtttttccgctcaagacgacgagaacgcttccatctgtctggttcgctaaaatctgtccgtccgccacagccaaaagcggaggtgaatcgaaaataaccagactgtaccggctgtacatctcctgaatcagctctcccatcgcctttgaagataaaagttcagccggattcggcggcgtcggtccgctcgttaagacgtaaaggttatcaatcagcgttttttgcaccgtttcgccgagggaagcgtttccgactaacacattcgtaaggccttgtacattttcaagctgataggtctcgtgtatcgtcggttttcgtaaatccgcatcgacgagcagcacctttttttcctgctgcgcaaataccgcggcaaggttggcggcgctgaatgattttccttctcccggaacggaagaagtgacgagaatagagcgcaaatgggtctgaacagaggagaactcaatatttgtccgaatggtgcggtattgttcagccaccaatgatttgtgatgtaaaacggatatttgagccagtccccttcttgatttcttttttctgaatcccaaacgcctcactccccgaaatgtttttcatcagaccgtgtctgctgatttttgatgtcatacacaacccctaaaacaggcaagtctgttttttcgctgagctgccgctcgcttttaacggtttcatcaagaaagtggagaaaaaacgcaagcgtcacacccgccatgagagccgcaccgaacgccatcatgatatttcggatgcgcgaaggcttgaccatcgggctttccgatgcttttgcctcagacaaaacaatgacgccttttatattcatcctgtcacggacttcttttttaaatgtcttcatcagcgtgttcgctatagcggcagcctgtttcgggttctcgtcctgcaccgctacggtaatgatctctgaatcggtttcgctgcttgtcgtgatctttgcttttaaagcggatgccgtctcagaaagatgcagcgtctgcttcactttctcaagcacaaccgggcttttcattatcgtttgaaatgtattgttgtaatgaagattcagctgaacgtcgctgagattcgaatttttttcaccgcttgtttcatgaatgagcacttgggtcgatgcctgataaacgggcgaaatcacccggaattggatgtatcccgtcaccagcgttacaactgctgtcatgataaaaatcagtaaaagtctgtgtttaataatgtcaaataattctttaaaactcatattctcattcatgtaattacagcctcatccttattgcatcaggcttaaacgcccccttctgttaatgattggattataaaagaaaaggtcgaaatttgaaaatttcaaattaagccatttggttctttttaaagaacattatcatgattttcctcttatttactgcacttaccttataattttaaattttataaagaacgaaaaatttcttataatgaacaaaaaaatgccagtatacaggggagaattcagcacaatgattggaagaataattcgtttataccgcagaagaaaaggctactctattaatcagctagcagttgaagcaggtgtctctaaatcttatttaagcaagatagaacggggggttcactcaaatccgtccatccaatttctgaaaaaagtatccgccaccctgcaggtcgatctgacggagctttttgatgccgaaacgatgctgcaccacatgggagacacggaagatgagtggcgcatccaccttgtgcaggccgtgcagtcgggcatgccgaaagaagaactgttcacctttacgaacaaactgactgaaaaacgcccggagcccgcaccctaccgcaacagaaaactgactgaatccaacattgaagaatggaaagcgctgatgcaggaagcaaaagaactcggcttgtccgttcaggaagtcagatcatttttagaacggaagcgttactgatgatatgctgatgaaagggcttttattcgcttcatatcttcatctctgtttataatgaaaagaaaaaaggggatgaaatcatgacaaaacttaccgttcaaacccgctccggcgcactgaaaggaactgccggccgcggtgcccgcacatggaagggcataccgtacgcgaagccgcccgtcggagagctcagatttaaagcgccggagccgcccgcaccttgggacggcgtaaaacatgccgattcgttcggaccggtttgtccgcagccggatgatatgctgtctatatcgttttccggagatgtaccgcctcaatctgaagattgcctttacctcaatgttttcgcccccgattcagagggcgaaaaaaagcctgtcatggtatggatacacggcggggcattttatttaggtgccggaagcgaaccgctttacgacggatctgcccttgccgctgacggagatgtcattgtagtgacactcaattacaggctcggaccgttcggctttttacatttgtcttctattcatgacgcgtattccgccaatatcgggctgctcgatcagatcgccgccctgcgctgggtgaaggacaatatatccgaatttggaggagacccggataacgtcacgatatttggtgaatcggcaggcggcatgagcatcgcctcccttatggcaatgcctgacgcaaaaggcctgtttcataaagccattttagaaagcggcgcctctcatacgatcccggcggacatggcaaaagacatcgcggcggcatttattcatgaagccggcactgatcaattgcaggagctttccgttaatgacctgcttaagactgcggataaagtgcggcgctcactagatcaaaacatttttcagcttttgtttcagcccgccatcgatccggccacattgcctgcggaaccggtgaaagccatagcagacggggccgcagaaggcatacctatgatcatcggaaccaatcgtgatgaagcatatttgtttttcacccctgatacagacattcattccgagaaaaaacagcaagattatttgcattatcatctcggagagaactgcactgagcaagcggcagatttatatccgcattcattaaagggacaaatcgatatgatgacggatctgattttctggcggccggctgtcgctttcgcacaaggacagtcgcagcacgcaccggtctggatgtaccgctttgattggcatggcgaaacaccgccgtttcataaagccgttcacgctctggaattgccgtttgtgttcggaaactttgattctttgagaaagacgctgcaagaaccgctcggtgatgacgcagaacagctttccaaacaaatccaatccgcatggctcacttttgcaaaaaccggaaacccgaacacctctcacttcaattggcctgaatatgataccgattcacgcgaaactttgcttttcaacacggataccgctgtcgaaagtgatcccgattcagcaaaacgccgcatcctgtttcaagcataaaaaacgccaagggagccggctcccttggcgtttcgttttcatcttacttcagacatcagtcagtttcgcagtatatccatttccacattacccctgatatgttatattctaacccaataagttaaccaaacattcataaaagagtttttatatggagaaatcaagtattatcggcacagctgccgttataatcggggcgcttatgaccttagtttcatttatcttcctgcgcgacactgatttctatgccgtgaggtggataggggttgttatcatgattgcaggattttcatgcgggccggcccacaccatttcaaaacataaaaacagacatgaaaaagaaacccggtaacctttactgggtttctttcatacacttcattttatctcacttcataatgcaactccgcaaattgtttgtaacgcctgacatcagtcagcttcagtcctgtctcccggtctccgggtttgaacaaagaaattccgcgtccgagcagaacgggggcgatctgaatgataaactcatcgacaagtttttcctccaaaaccgggtgcagcagatcactcccgccgacaatccaaatccgcttgccttcttggcgtttcaatgcttttataaaatcggcaggctcttcatgaacaaaccgcacatgttcagtacgcccggtcaatgtccgcgaaaacacatagcattctttacctttgtacggaaattcctcaggcaataaaaccaatatgtcctcgtatgtttttctgcccatgatgatcgtatcgacagattcatagaaagcttcataatcggtgccgtcttcaccttcagttccgattaaccaatctaaagagtgattttcccgcgcaagatagccatctgcgctgacagctccgtaaaaaacgagctttctttgaccgctcataaaaatccctccccttttttattataccttgaacatgcggatgaaatgaaaaatgatagaatcgggtaaaaacccccgctaccgggttttcgtttcttcctgttttggagatgctgttactatgccgtctatccatcttccggtaatcggcataaagaaatggagaatgacccctcctaaacaaacggttaataacgttccgatgcctaccggaccttttagcatcacggccagtatgaaaaatatgaagtaaatgaccgttcttgaaaaaaagatgcttctcccggttaattcgcggacaattaacgttaaccgatcaaccgggatcggtgcgaaatttgtgtgcagataggttgcggttcctatccctatcacaactaaaccgattgcaaaacagcccgcttttccgtaccatggttcaggcgttatgattcggtgcaggaaaaaaagccacatatcaatcccgattcccgttataaacgccgtaatcatccctgtaaattccggtctttgtctttttaacattgaattacagcaaattaacaggaaagcgatgatgatttcccagcttcccacggtaagccctgcatggacggataatcccacaataagcgcatcaaaaggagacgttccaagatctgattgaatcgtgacagaaataccaaaggtcaagatcatgattcctaaaacataaaaaacatatttcactttatcgtcctcattttcttattttatgttgcaaatacaacaaaaatacggtatgtttactatacggtattttcattgcaaatacaacaaaaaaatcagctgatatgataaatgaagaaaggagctgtatgaccatgagtattcaattaaaaaagtgcagccttaacgatataacagagctccgggagataagcattgaaacattcaatgatacatttaaggatcaaaattcaccagaaaatatgaaagcttatttggaaaattcattccgctctgaacagctgaaaaaggaattatccaatctgtcttctaaattctattttgtttattatcatgatgaccttgcggggtatgtaaaagtcaacatgaacgaagcacaatcagaaaaaatgggtgaagattctcttgagattgagagaatttatataagaaaaaaccaccagaaacacgggcttggcaaatatctgctgaatgaagctgtgaaaatcgcaacagcacacaataaaaagaaaatctggctgggcgtatgggaaaaaaacgaaaatgcaatcgccttttatcaaaaaatggggtttgtccaaactggagaacactctttttatatgggggatgataagcaagtcgactttatcatgaccaaaaccctgtcgtaaaaggatacaaaaaacccggccaagctgccgggttttttctcttattttaattttcccgcacggatatcatcggtcattccttcgtacggcgcttctgaaatcagtgcttcgttattgattcccgcattgttgagatacgtaatatccgcaaactcgggaacgacatatttcggatacgtttcatatttctcacgtgactctttcatcacgtcaatgtaatcattttggtagcacaccgtgatttccggatgctcatgcacccatttcgggaagaaaataattccgtgcatccgtttttcattcggcataaagtttaaggaaacgtctgtgcctgtcggttcagtccatgacactttgtatacgccttctgtcagtttgacgatattcacttcctggtcgcgcacccagcggccgcccaccattccgctatgaatccgatagtcgatggtatgatcatttttaatatagatttcatactcccagccgttttcatacgtgtaaatcatatggcttccgataaagttttccatgttgactcactctccatcttattattgaacttcataaatatctaaccgaatgtcatccggcaatctgaccgcagccccgataaacagccggtcctgcagatgctgatatgcctcgctgcttgtttcaaacacaggcacagtgcggaaatacacgtgctcgggatcaatgatgcggttcactgactcataaatgacttttttaaagaaggttcattcaaggacgtatcacctcccgagatattatgtttatttaaacatgtaactatttacatgtttaattgtaacgctgttaaaatggactgtcaaataatgagctgttccggttatgtttttcagtgttcaataaaaaaagacaagggcggcacatgccgaaacccttgtctttttcatttgctgtatactcatatatcaaaaaacgccagacgagcgtcttcttagtaatcgcaatctttatctctgcattctttcttacagcgtctattgagtgccccatgatcttgtcatttgccttatcgtaaataccatcgaatttattcgatgtatcaccgttgtaatagccaaatacctctatcccgcccattggatctatttcgtatttatctttaaatgtaacgttatgtatgccttcataattcgatttgataaatttctccattcgttcttgagcaatctttatctcttcagcctgagcatttttatcattactattcttcattataaaacttccggctgctattaagataatgaacataataatatatttttcacagaaacatccgtatcatcagttatgatgaagctcgcggactaaacgaccggtgacatccggtgcattaattcatacaaaaacagacgccatttaggcgacttaaagtttttcttcaatgttcacagcggatcatataaaccggcaaacaagagaacttctttattttgcgtcttttagtattcacattctttttcctgacattcgggtttctcttccgcatcgactgacgaaactcctatttcatcattcgttttgtcataaagtccgaaaaattctttttccttattaccattcaagtaccccttcacggaaataccacccataggatttattttataatcgttaatgtatgtaatttgctttatatctttgtgattagcttttatatagctttccattttatttttcgcttggttaaaaagttcttgctctgcttcttttttactatggtggtacctcatgtaggtacttcctgacgctatagttattacaaatatcaggacaatcatgtatttcttcacagactcatcctttcttagattaaatttacatcaacctcagagtgttgtacatgtctaaaaaacatcaatgtatcaaatatcagtgatcgagattacttttatataagcgttagttagactagcctaaagggtgtgtgaatttctaaaaaagtttatagtcagatctagatttaataaagttatgaaggagaagggaattcaaagccagaaggaattggctgatttagttggttcaactgatgttacgataagcagatttaaaacaaatacaagatatgatatcacaacactattcattattaaattagaggaagagcaatacaacaaaattagtccagctcgattgagcaggctaatttatcttgtacaaagaaagcttatctttacattcttcttttggttcggcatcaaccgtatatgataatatttctttattgcctggatcatacagaccttcaaactctttttctccgttagtataacccttaacactaataccatccattggattaatataataattctcagaaaaatggatatcatccgcatttttatagttcgttgttaaaaacttttccatatgattctgggcttcttcgagtagagcaaactctttttccttttgatcataccgatgcttcataaaaagtcccccaactgctataattattaaaataaggataattatgtactttttcttcatttggaaatcaaccccttcctataaataactgtcgttcttaagtaaacgaaatgagcgaaaactcgatatgaatatactttcagcatgtcaaaagcaaagctaaccaattcagaattcatcgcgattgttgctgacaagttaagattggaacttaaagcgagtgaaatgctgatctgacgtttttcctatcgttgagttgtcatgatatttgtaccgttaatatcggggatacctcgacaaatgagacggtagaggcgattgatctcaggaataggtttgaactgtatgagaaacatatctcgaatcttgtaagataattaaacaaaataaatacccactcatcctgaggtgggtattttacctttcttcggcattgaccactgaaatccctatctccttattcgttggatcatatataccggaaaattctttttctttattattatttatgtagcctgaaacttcaactccgcctgtcggatcgatattgtagtcttttgaaaaatgaacttcctttacatttttatagtcttttttcaagtaattcttcatgtgctcttgcgcctcaatcacaagtttttcttcgtttttatgtttatcatattgatgcttcacgaaaaaaactcccactgctataattataacaattaggataataatgtattttctcatgcgtatcatcctttcggaactattttacaatataagaaaggtgatgtatatttcacaaaaggaaaagaaataaccgtctctgatgtcacagataaagaatattaccgtttgtttgagtcaagcagcttacaattataaaatgttagccctgcatatgaaatataaaactccttacaaaataagtaagcgtcatattggtacgttgagaaagcgcagcagggttctgatacggggcttgatgcctttgtattctcaaaaggcatcaagacaaaaagcagaaaatggatcaaatcaaaaaaccccgaaaacgtggtcgtcgcctttgcgggaaccgatatcgcaaaagatccgatcaatgacggcgcaaaagcggacggcagcaatattgttttcggaaatgatccgaaaaaagaagtacattatattgtaaaaaaagacgcaaaggatacatcaaaaacactcggaacctatcacggaacgccctctcaagacgccatgctcacaaccggaaagtataagctgatgacgaaaacttcgcaaatcgatcaagccgatcagctggtacgcagcgtaaagaaaaagtatgccggaacgtcaacgattatttcaacaaccggccattcactcggcggcgctgaggccgaatacagcgcggtgaataatgatgtgtacgccgtcgcgtttaacagtccttccgtcgtgaaactgcacgatgaagaaacacagaaagacatcaacagcggcatttacgatccttacatccggtcaattatcaatccggacgacatggtcggggcgggttattggaacgaatatgaccgccacaacgggaccacaatttatacgaaaaacccctcgctctcacagttcagccgaaagcagcggcttgatggaaaattgagcgagcagatcggaaaaaatctcgcttatttcttcactaccgtcattctgagaaatccggatacacacggcttaaacgaagcaaatttcgtgttcgacagaaacggcactattgcaaatccgaacggagatgaattagtctttgacaaaaacctcggcgctcttctgccagccggtgcgatcggaagcggagacgcgataaaagtaacgccgaaaaacgcaaagaagctggctgaaaaggtgcaggccatgactgaggatttgcggacgatgaaaaaagaagcgcagaatgcctatcaggagcacgatgaaaaaatcgccgagctgaaaacggaattctacggtcaagtcggacacggcttgtatgaccagcttcaagcacaggacgtgaccaataccattgaagatattgcgctatcttacgagaaaggcccgattttttacgacactcaggctgagcaggcgtttattgattctttgcaggcggcgatcacagaccttgaagagatcggcggattctcacataaaatagcagacgaatttcaggaaaaagaccagatgctcgcaaactggttaagatgatagaggtgtatacataatgccgacattagacgaacttttagaacacaaggacgatccaatgaagaaaatgctgcagcggcagatgctgaaaacagggatgacgcaggcagcggggacaaaacttgaaacagtccgccgaacgctgaaaccgacattcgaaatggatacgttgaaagatgaattatatgaagtgtattcagcactattgaacagctttgagggcaaggcgcaaaaagctctcgcgcagcggatcagtgaaagtgcgcggctgattgccggaaccgaacataacagagacacattcgttaacagtttcaaaacaagataaaataaaaaaacctcgcagatttatcatctgcgaggtttttcctatcgtcttaactgagacgcgctcggagggattcgaacccccgacagacgtggtaccggaaaccaccgctctatccaactgagctacgagcgcacgttttttcaatcagatacctttatattataataaagaaacgcgcagaaagcaactcttttttgataatgcacaacaggattatgcagcgtcctcatgcagcataatcctgcatcgtttaccggcattgattttcacaaaaaaaccattcaggcggactgcccccggctcagtacattttcaatcactgcagaaaaagcggtaatcacccgtttcagctttttttccaaatgtcttttaacgtccaataggtgaattcctcaacctttacggcgcctttctcagaaaacagctcaatccccaatctgccttcattcggatagatacggcttgtcatcgttgtttctccatgattggcgaatacttcaatcgaggatctgtcaataaagatacgcagcgccagcttgccgtttgtatccgtctgcacccttcttacaccgtctttcgctttccccatcttggtgcaatcaagcgtcagctttttatccgttagattgtatgtcagcacaagttcttcttcatcaaggccgcgaatcttaaaacctgccgtttcggcatcagaatcgttcacatcaaacacggcccggacttcaagcaggtcttcggacgtctttgccaagtaactccctgaaagcgatcgtccggcacattcccggtattccattttccgcagctgcttggtttcttccacgggattcatcaaaagtttatgatcatcacgcaaagtcagttctcgcggcaaagtcaatgcaccgcaccatccgtccgcttttgtcggcatctcagattcccacatatccatccagccgatagcaattctgcgtcctttatcatctaataatgtttgcacggcgtaaaagtcatggccgtgatccagttctttaaaagcgccgtgtgtaaatttgtttgtttcatcatgatagtcaccgattaaatagccggtttgatgtaaattttgataggaatcaccgtccgcctcgatcccctggggcgaaatcagcaggacatgcttgccgcctaattcaaagaaatcaggacattcccacatatagccgagattaccgtcactttgggcgagaacacccgcgtattcccaatcacgcaaatcaggtgaacggtataaaacgacccgtccgacgttttcttttgaagagttgccgatgaccatataccaaacatcgcgatgcttccatactttcggatcgcggaaatgacgggcgctgtcttccggcggttccgcaataacagggttttcctgaagcttttcaaacacgattccatcttggctgacagcgatattttgagtttgatagaataggtctttctcttgatcaattatattatgtcctgtatagatgagggctaatcttccatgatcatcgaccgcgcttcccgaaaaacagccgctttggtcgaatgcatcgcccggagctaaggcaaccggcaggtgctcccaatgaatgagatctttactttttacatgtccccaatgcatcggcccccaatgctcatcatacggatgatgctgaaaaaagacgtggtattctcctttaaactgaataagcccgttcggatcattgatccaattcgcccggggcataatatggtaccccaatcgatatctttgtttcactttaccctcggcttccttcagagcttcttccgcctgctgaattctatccatttgtaacatcctctctatccgattttttgcagacgctggacacgcctgctgttttgtttcgggcccaataaagtaaatatggagatgacggtaaaaccgaagacgacgattcccatgatgagataggtttgacggaaccccgcactgtcatataatcctcccgcaagcggcgacagaatcgacgcgcctgcctgagatgcgaattgaaaaccgacgagataaaggacggacgacagacgcgtatcaaaattggcagccaaatatttaaaaacggcgatcagcataatcggcaattccagtgcgtggatgagtttcattgatgaaatgcctacaggctcaactgcaattccggacccgacgatgcggaaagccattaaaaaccccgctaaaatcaaactgtttttcgccccgaacttattgacgataaaaggcgcaagaaacatcatgccggcctccaaaaacacctggaatgaattaagatagccgaatacttggttacccgtcgacactgaaggaaacaaagacgcatagtagatcggaaactgctgatcatatacgccgtaaatgcaagtcaccccgataatgtacagcataaaaaaccagaaatctcttagtaaaaagagccgccccacgtcttttaaccggaccgaatccgctctgtttttctcatgatcggtcatttctattttcacagacatgataatggccgttaatatgacggctgaaacagacgcgatccagaagttgatattgggattgatattgaaaagctgccctgcaaaaaatgcagccgccgcccagcccagcgagccccacattcttgatctaccatactcgaaatcatacttacggctgaccttttcaatgtacgtttcaatcgcgcctatccctgccaaaaaagcggctcccaaatataagcctccgacaacggcgccaagaaagacgttgtattgtaaaagcggcccatagacgaagatataaaacggacccgtgaatatgagaagacagctgatcataaacaatatctttttcttcagccccaatttgtcagagataaaaccgtaaagaggctgcatgcacagggcaaatacggcgtttacagaaaagataatgcctgtcgctgatccgtttaaattgatttcctgccctaaccaaatcgcaaataaagaatagctggaagaccaagtaaaaaagaaaaagaagaaataagcactcagtttccaatacagactttttgagcttttcatttgcaccgctcctttaataggaccttttaatagccgttttagagccgcatacttccttcttcattttcatcacatacatgcgatctctgagtaagcgcttactttctatcgctgcttaattctttcactttattgccgccagccatctctccatacccgtcacttcccttcactccgtaaataaagcgctttcaaaaagaattgtatgtcaaccggttccatatgtcaatcggttgacatacaattttctgattattttaatcaaacaaaacgcaccctctttatatgaaaacagaaacacggaatgtccttgcacatgtcagcctgattctctaaaataagtgcgtgacggaaattgtaagccatttcagtaagcaggagggcacgggaatgaagcctaacattcatgatgttgcgaaaatagcgggagtttcatctacaaccgtttcgcgggtattaaataaccgcggctatatcagcgaaaaaacaaaagaaaaagtgtacaaggcgatggaagaaatcaattactttccaaacgatctggcccgctctttattccgaaaacgaaccaatttaatagggcttatcatcccaaactccagcaatccgtttttcggcgaactcgcctttcatattgaaagcatttgtacgtccatgggctacaaactgctgctttgcaacagtttacatcgaaaggataaggaagaaaaatatttggagatgctgataagaaaccaagtggacggcgtgatcgccgtgacttacaaccggggaattctcaattatcacaagcaaaatctgccgattgtcgccattgatcattacttatcggacacgattcccgtcgtcggctcagacaactatgacggcggaaaaaaggcggcagaactgctgattgaaaaagggtgccggcacatcgtccatatcaacggcccgattgaactcgaaacaccggcaaacctcagaagaaaagcatacgaagacgtcatgcatgaacacggacggaagcctattacatatgaagtacccttttatcagcattaccatgacattatttcaacattattcgatgaacagcccgacaccgacggaatttttgccagcgatgatatcatggcggctgcagtgatgaccgaggccaaaaaacggggaatagacatcccgaatcaattaaaagtgatcggttatgacggcactgaaaccgttcaatcggttctgccggacttggcaaccatccagcagccgattgaattgatttccaaaacagccatcgagattttagcaaaagaaattgaaggcgaatttgatgatttgccgctggaaacgtatttgccggtacggcttttggaagggcggacaacgtagtcagaccgttcagccgtacgtagcgacgcgattgcggtctattttgagcgctccggccatatcattttctcaaggctccggcattgatcatcctcatttccgctttgctgtttgaactttttgttttatgggaaaaatggtgttagaagaaaaggttggcattttggtcagcgttttgtttgacctttattgaccaaaaatgtatcatgtaaatacatacttacctaaaaggtgaaggaggagcattatgaatttaatacctacagtcattgaacaaacgaaccgcggagaaagagcttatgacatttactcccgtcttttgaaggaccgtattatcatgcttggatctgcgattgatgacaacgttgcgaactccatcgtgtcacagcttttattccttgaagcggaagaccctgaaaaagatatttccatttatattaacagccctggcggatcaatcactgccggcatggcaatctatgatacaatgcagttcattaaaccgaaagtatccacgatctgcatcggtatggccgcttctatgggagcatttttacttgcagccggagaaaaaggcaaacgttacgcgcttcctaacagtgaagttatgattcaccagccgcttggcggagcgcaaggacaggcgacagaaattgaaatcgcggcaaaacgcattctcttgcttcgcgacaaattaaacaaagtgcttgctgaacgtaccggccagccgcttgaagtcattgagcgtgatacagaccgcgacaacttcaaatcagctgatgaagccttagaatacggcttaatcgataaagtgctgacacgcaatacagaagaccagaagtaatgccaaaaaacctgcaagagctgatgtctcttgcaggttttttatgctttattcccattcaaaaaagtaatgaatgctttgacgacagataattctaacgctgaagaatcatacataagccaagtatcgcgtatcacaggctcgttatttttataggatagcgccaatgtgtataattcatcagaaggctgaagacagatttccggcacaacagaataaccgagaccgtttttcaccatctctttacaggtttcctgcctgtctacctccatcgcaatgaaaggcggttcagtaaattggttattccaccatttttgaatcaaacttttcaaagaagcatcagtttgataataaatcatcggcaatttgggaaggtcctcactgttgatttcagtttttgaaataaggtacagtctctcttcatttagcagttgtttttccccttgccaatcataatttcccctcataatcccaaggtgtacccccgaatgatgaagcagatccatcaccttcgcactccatcccgtattgacgtggaattgaacagacggatactgatcagaaaaccgttttagaatcgccgggagcttatactgagcaaaattgcttgagactcctaatctgagaaccccgctgacttcatggctcatattgagcatatcatccttcactcttctgaattcctgcagcatctctttcgaataatcaaccagatgttcaccttctgaagtgaactccatccctttttttcttttataaaaaaggcgcactccgaattgtgcttccaggtttttgagccgataacttaacgccggctgtgtcatatataatcgctctgccgccttcgtcatatttttttcttcgaataatgtaatgagcacaatccaatccttttcatccatatgaaatcccccaaaatatttttctgctataaaatttcctcctattataaaagttttttattcaactttataaaaattatatgttttacttataatccttatttatcatacgatattttccaaagggaccggtacctttttatccacacaaaatgatgtaaggatgagacagcatggaaaaagttcctgtaaccgtcatgagaggcggcaccagcaaaggcgtttttattcatcaaaaagacatgccagacgatacaaacctatggagcgattttcttttagacattatggggagccctgacgagagacaaattgacggtctcggcggcggccattctctcacaagcaaggcagccattattaagaaatccgccagaaaggatgcagatgttgagtatacgtttgctcaggtcagtttgactgaccattttacggacttcaaaggcaattgcggaaatatctcttctgccgtaggcccttatgctattgagaaagggctcgttcaagctgaagagccggttacaaaagtcagaatgttaaatacaaacactcaaaaagtgatcgtagcagaagttgaagtcagaaatggaacatttcattaccagggggactgctctatccccggggttccaggtacagcttctcctatttatctttcatttcaccaggctgaaggagcggtgaccggtaagctgtttcccactggtcagcctattgatgttctcgatacaccgtatggaaatatctcggtctcgattattgattacgctaatccgcttgtctttgtaaaagcagaggacacggggcttaccggcttagaacttccggatgaatatactccggatatattggaaaagctcgaaatgatccgatcgattgcagccgagaaatgcagattcgctccgagacatgaggctgctgcaaaatcaccggccgtaccaaaactaacattaatctcatctccagcggattatatcgatacaaaagggataaagagacatgcagaagagatggatcttgtcattcgtatgatgtccatgcaaaaaccgcatcaagctttagccattacaggggcggtttgtacgactgccggcatgctattgcaggatacaatattatctgaattttcattctatggcagaacgattcgattgggacatccaagcggcattttagaaaccgaggcagatgctgatccggatggaacaacgattaaagtagtacgcacagcaagaaaaatctctgaaggctatgtgtttacaaagcaaagttacaacctgaatacgctgaatcacattggttaataccagtcttcagacaagtcaaagataaacggaggaatacgagatgatcaatgtaaatgcgtctaatcgattaaacagactgcctttttcaagggcccatcaagcagtgctcgttatcctttcattcgcttacttttttgattttatcgatttaaatacgttttcatatgcggcgccttcacttttaaaggaatggaacatttcgactcataccatcgcttttattacgtctgtctcctatttcggaatgtttatcggcgcctctgccggaggatggttttcagaccgtttcggaaggaaaaaaggtttaattctggttgtcacttttttctctttcttctccctcctctcttctctggcttggaacccagaaatactcggtgtttttagatttcttacgagtttaggtatcggtgccacaacgattgtggcaagtacgtatatcagcgaatttttcccatccgcaactaagggtaaataccaggcaatctgtattacaatcggcatatgcggaattcctgcagccggctgggtggctaaattggtcgtgccgtccgcctcttacggctggcggtttatctttctattcggcgcggtcggtattttttttccgctgatcgccagaaaactggaagaatcaccgaaatggctggacacaaaaggaaaaagcgaacaagcacaccgcattctgcttgaactggaggcaaaagcagaaaaagaaaagggtgaactgcctgaaccagctccggctctgcgaagcagacaaaccgctgtaaaatccgttccatatcggacgttatttcaaaagcctttggcaggaagaacttttgttttaatgacgatgtgggcagcttccacgattgcaattcaaggctttggcacgtgggttcccacccttttggtaaaagaaggcgtatcaatggatgagtctatcgtatacgtcactctgggaacgatcggtgccccgctgggcgctctcattgcgtcgcaaatctctgaccgtgtggatcgaaagtgggccatttctgttttatcgttaattattatggcgcttggattcttttacggcatcaatcctttgccgatggtcattgtcatatgcggatttctcatgcatatgtttgagcgtacgttcagttcgatcgcatatgcctatacgccggaattatatccggttgaagccagggcctctggaaatggtctcacttacggcgtaggacgtcttgcgaatgtagccggtccctttgtcgtcagtttcctgtattcaggctacggatttttaagtgttttcttgttttttacaggctgctggtttctttgtgcactgacagtcggtatatttggaatcagttcaaaaaaacaaaagatgcagcaggatgatttcatatcggaggaaacattcgtgcaacaaaagttgtaaacgcatacagtctgcaaaccgcaaaacatccatctcctctgaggaaatggatgttcttctttcaaccccaacagcattctctttctcatcttattctcatacatatgtcttatcctgaagaaaggtgtgatacgcatgagaaagagaaaacgatttccagaaagaaaaggtattctataggcggagaattttccatcagaatagattagatgcaaccgccgaaacatatttcagacctctgacttacaattcccgccatttcttatctaaaatcgggtatgtataccgattcatctgctcaatcagctcatccggccgggaggaactgtgtatcagcttcaaatgagactcattcgaaaatccttcctgaatgctgtacttgaccatcttcatcatcggctcaaaatacccgttcacattgtacagtccgatcggtttttgatgaatgccgatttgcgcccagcatagcacttcaaataactcttcatatgttccgaagccgccgggcatggcaatgtacccatcggcaagttcactcattttcgctttccgctcatgcatgccgctgacttcaatcagctccgtcagattctgatgaacaacctctccgctgaacagcccgctcggcatgacgccgacagcttttccgccgcctgccattaacgcgtcggcgacggttcccatcagaccgatccgtgaaccgccgtaaacaaggccgattccctgctccgccatatattcacccagttcggccgctttgcgtttgtactcttcatttacccccgggtttgaccccgcaaatacacaaatggttttcattttttcatctccatatctatatatgtacatcaataaatcaaaatacactatatattgtcccatctctatatgataatatcaataagaatcatacaggacataaggagtgtttcacatgcagatggctgaagcagaacaatggacgaaagatttttatgaaaaacgaggatggacggcgtacgggccatttatcagaatcggttttttaatggaagaggcgggtgagctcgcccgggcggtaagagcatatgaaatcggcagagaccggccggatgaaaaagacgcgacccaggctgaacgcaggcaggagctgattgaagaaatgggtgacgtcctcggaaatctggctatccttgctgataagtacggcatcacgttagaagatgcgatgaaagcccatcaggaaaaactgatcaagcgctttgaaaccgaataaaaacacggcctgtccgctttttcatggacaggccgtatctgaatttatcccgttatctcgtcctgatgctcaaagaaatgctgtttcccgattttatgaaacagccccgtcttccggatcagctctctcggctgtgattgcaatccgacgatcatcaatctcccgttatgccgtttgatccggttcatcacattccccagcaccgcttctgcggaggtatccatgtaatgtacattattcatcagcagaataagcgtcttcggcttttcctgaagcctctccagcagcgatgtttccagtgaatcaattgaaccgaaaaacagcggcccttcaatggaatatgtgctgacggacgaatcatttttaaccgatttgacagcggcatgcggtgttttgatacgtgttgattcgctcatttttctgataaagaaaacaaaagcgagcacgagaccggcagaaacgccgatgattaaatcaaacagaaccgtcagcaaaaaggttgccgccagtacgaatgaatcagtgtttttcagccgcatcatattggcgacttccctccgctcactcatgttccaagccacaaccatcaataccggcgccatgcttgccagcggtacgtgaacggcaagcggggcgaagacgagcaggacgaggaggacggtgactccgtggacaacaccggaaatcggagaaactgcgccgtttttaatatttgttgcggtccgcgcaatcgctcccgttgccggtataccgccgaaaagcggcgctgccatattggcgatgccctgcccgacaagctccctattgctgtcatgccgtgatcctttcatattgtccgcgaccatcgccgataatatggactcaagtccgccgagaagcgcaatgatcagagccgacggaaacatcatgatcatgttatcgattgagaaatccggaagctggaaagccggaagctgccgcgggatttccccgtaagcagaaccgattgtcgccattttgtcaggaaaaaacacgaccgccgcggctgtagagacaagcagcgccacaagcgcgcccggaatcttcggcatcagcctggctgataacagcaaaatggccaaagcaattcccgcgatgaggatgctgtacaaattaaaggttccgagcttcttgcctatttccgcaatgttgaggataaagctttcatgcttttggatatcgcgcagaccgagaaaatgggcaatctgctccgagaaaatcagcaccgcgattccggccgtaaatccgacgatcaccggcttcggcacgaatttcataatctttccgagcttaaatacgccaaacaggacgagcatgacgcctgccataaaaccggctacaagtaaattctcaaaaccatactgcatcacaatggcaaataaaatgggaacaaacgcccccgtaggcccgccgatctgatatttagagccgcccaacagcgaaatcagaattccggccacaataacggtgtaaagcccgtattccggaccgacccccgaggcgatggcaaaggccattcccagtggaatcgctacaattccgaccacaattcccgcgattaggtctttctgaaatttctgcaaattgtatccctgatatctgccggtaaattgcatcgtcagctgcatcctcctttgactgtttcataaccgtcaacgacaacatccagcgtccccgtccccggatcgatcaccagcccgtgcaccggcacctcttcaggcaagagcggatgatgcctgaccatattcacgctgtgggccacgctttcttcgacgctgtgaaaaccggtcagccatgtttccaaatcgactcccgcatgctgcagaaggctgagacatttgtcttccacgccgcgctctttcgctttatttaatatggaagccgcatttaatcccgacattccgcactcgcggtgacctatgatgcagacttcctctgcctgcagttcataaacggcaaccaaaatgctccgcatgacacttccaaatgggtgagaaacaatggctcccgcgttttttatgattttggcatcgccgtttctgagtcccatcgcctgcggcagaagctccgtcagccttgtatccatacaggatacgatgacaagcttttttttcgggaattttgtcgtttggtaaggttcatatttcctttcttggacaaactgctggttgtgctccaaaatgcttgataaagaaaccatttttctattcatctcccatccgattgtattgcaagccttcttacccagcttacaataaggaattatagcacagaaaaaggcctcaaaagcgctttcaaaaaaagacacgataatttaactgtaaattcagattatgttcatttatatctttcaaaaataataaaatttatctttacaccaacctataaagcttttaaaaacagcggttccgctcattttgccttcagaaatataggcggattctgttattgtttggagaaatcaagcatgtacatttctttttctttcattttaagttcaaaagaaccagaaatttatcgtaatgcgtttgaatatttctcacgttaccgcttctcttatataataaaatagagaagaaagacaaaggaggagaagcccgttgaaaccctatgtattcatcgcgaaaccgataccgccggaagtcgaacaaatgatatgcgagcattgccggtatgacatctggaaagcagataccattccaaaagaggaactgtacgaaaaaatgaaagatgctgaagggctgctgacatccggaacggcgattgacagtgatttactggatcacgcgccgaagctgaaggtcgtcagcaataattctgtcggctatgataattttaatattgaagaaatgaaaagacgcggggttgtcggcacgcatacgccgtacaccttagatgacactgtcgctgatctggctttttcattaattctgtcttccgccagacgggttgccgaattggatcgattcgtccgcgccggcaaatggggaaccgttgaggaagaatctcttttcggtatggatgtccaccatcagacattaggaattatcggcatgggcagaatcggtgaacaagctgccaaacgggcaaaattcggctttgatatggacgtgctgtattataatcgcagcagaaaaccggacgctgagaaggaactcggggttacatatgccgacttagatacactgctgaaaacatcagactttgtgctgttaattacgccgcttactgacgaaacgtatcatatgatgggagagcgggaatttaaattgatgaaagatacggcatgtttcgtcaatatttcccggggaaagacggttgatgagaaagcgctcatccgcgcattgcaggagggctggataaaaggcgccggtttagatgtgtttgaaaaagagccgatcgccgaagacaatccgctcctgcagctggaaaacgtcacattgcttccgcatatcgggtcagcaacggcaaaaatccgtttgaatatgttcaagcaagccgcacaaaacatgattgacgccgtatacggaaaaacgccgaaaaacctcacgaaggaatttcaatgagatgaaaaatcccggccgtttcagccggggtttattttttgctagatcaaaagaactatttttaaattctttctattcctttctctcgatgctgatacaatgaaaaggaatcagcttcacatgataaaaatgggaggtattgctttgaaaaaacgattatcgtggatttccgtttgtttgctggtgctgttctccgcggcggggatgctgttttccacggctgccaagacggatacatcttctcacaaggcgcacactgaagcacaggttatcaacacgtttgacggggttgcggattatcttcagacctatcataagcttcctgataattacattacaaagtcagaagcgcaggccctcggctgggttgcatcaaaggggaatcttgcagacgtcgctccggggaaaagcatcggcggagacatcttctcaaacagggaaggcaaactccctgccaaaagcggacggacgtggcgtgaagcggatattaactatacatcaggcttcagaaattcagaccggattctttactcaagcgactggctgatttataagacgacagatcattataaaacctttacaaaaatgagataaacacatacaaaaaacggcttccctgcggaggccgttttttttgcagagaacctgcgagcttcatataaaatgagcagtaaatttttcttcaaactctgaccggtctattctgctgttttccgccgtgccatcgtgtttttttattgttatattgcgttcagacagaaccatgtgcccttccggtgtccgcttagaagcaagcaggcgtttgttgaaaggagagcgttcatgttcaaagattgtttgtttcatagacttgaggtccttttcatcgatttcttcaagcgaaaatgcgtaacctgtctgccagccgtcccctttgttcatttcaagcaggtatgtcccgaattccgtctcttctatcctcacgcggaacgctccggccgctgataccgtctcgtctcccgacatcggcacaggctgcatggcgagattgaggccgaagcctgcatcagcgatgtactcattccccccggcggaaagaagtacggccgcatgtgtgccgggcagcgcccagccgtttttccagaccgttccgcggatcaatttgacatcaaatccggcatctttcaggatgaaataaagcagtccgttcaagtcataacaaaggccgccatgaggttccttcaccatgtgccgccacagtccttctttcgtgacgtcatattcttttttggacaaaaccgcgcgattttcaaacggaaaccgatatgcgagcgcctttaaaaactccggcaggttgctgaaatcgagggaatccttttcccagcctatcgtttgataacaatctttcagaaactcattcatcgttccgtcccccttacaaagtgtttacacttcttcctgcacataagcggacaacttttccagcgcttccttttcatcgtcgccttcagcgatcagagtgacttccgtccccgtgctgaccgccagactcattaatcccataatgcttttggcattcactttcttgccgtttttctcaagaaacacatctgatgcaaaacgatttgcctcctgtacaaacaatgcagcgggacgcgcctgcaatcccgtctttaaacgcacttccactttcccctgaaccataagatctccccttttctgtacggttatttcaaagtgatgctttgtcctgtacgcagctgttctgcgatttcatcgagctttctcagcctgtgattgatgccggatttgctgattttcccgcttgcaaccatttcccccagttctttcagcgtgacctcctgataatcaatccgcagctgcgcaatttcgcgaagcttttccggcagcgcttcaagaccgatccgttcatcaatgtatttaatattttccacctgtctgagagaagcaccgatggttttgtttaagtttgctgtttcacaattgacgaggcggttcactgagtttctcatgtctctgacaatccgcacatcttcaaaacgcagcagtgaattgtgagcgccgatgacattcagaaattcagtgattttttccgcctcttttaaatacgtaatatagccttttttccgttcaagcgttttgctgttcagatgaaattcattcagcagcgcgcataatgaatcgttatgttccttataaagcgagaagatttccaagtggtacgacgatgtttcgggattattcacagatccccccgccaaaaacgcccctctcatataagaacgtttgcagcagcgtttcgccaccagttcctcagaaatattccgttcaaatacaaagttctctccgaggattttcaattcctctaaaatcagctttgcattttcagaaaagcgcacaatataaacattgttttttttcagccgcattttttttctgactaacagttcgaccgatacatcatattgtttcttcagcaatgtataaatgcggcgggcaatcgccgcattttcggtttgaacgtcaagcacgagatggcggtttgaaaatgacagtgaaccgttcatccgaatcagcgcggacagctccgccttggcgcagcagtccttcacttccaggttcgtcagttctttttttgtttccgatgcaaatgacatattagccacctcatttcaaaaggcctctagtcccttaataaatcgacaagaagagaagccactttatgtgtatcgtgacggattacgccatttttatacgtgataatctgatccctgatgacctcaagccccatggatttcagcttttcaacattgaagtcgacgggccgggccagctctttcgcatatttgcttttgatttcgtcagggatctcctcattgttgattaagatcgtgtcgataaacggctgctccatatgatcgttcagcgccttgacatggtcggccgcactgtattgcagcgtctctccgggctgcgtcatgacgttgcatatatatacttttttggccgcagccttgacgacttcctctccgattttcggtacgagcagattcggaagaatgcttgtgtacaggcttcccggaccgataatgattaaatcggcctgacggatgacgtcaatcgtttccgggagcggatcaattttttcaggcgtaagaaacacccgtttaatccgttggccgtaagaagggattgtcgattctccggagacgacctgcccgtcctccatttcagcgtgaagaacgacactggtgttggcagccggcagcactctgccgcggacattcagcaccttgctcatttcggtgacagcgtgaaagaaatcaccggttatatttgtcatcgctgccaaaatcaaattgccgagcgaatgtccggttaagtcgcttcctttgttgaaacggtgctgaaacagattttcaacgagcggctcaacatctgacaaagcagccagtacgttacggatgtcacccggcggcggaatttgaagttcatcccgcagacggcctgaacttccgccgtcatcagcaactgtcacaatcgccgtaatatcaacgggcttatgctttaacccccgaagcagcacggacagacccgttccgccgccgaagattgcgattttcggcttcttattcatttccggcttctcttttcaatgtcccggtgggtgacatgagtatagaaatcttttttaaaatagtcagccaaatactcagcgagcgtgacggagcggtgctggccgcccgtacagccgatcgcgatgacaagctggcttttaccttcccgcttataagacggaagcataaagccgagcagatcaacaagcttttcaataaacttttgtgtttcgttccacttcatcacataggatgacacttcctcatctttccccgtaagcggcctcatgctttcaatgtagaacggattcggcagaaaccttacatcaaacacgaggtcggcatctatcggaagcccgtatttgaacccgaatgacattacgttcactgtaaatgtttcaccttggttcgtggcgaaatgcgccacgattttttcacgcagatcacgcggtttcatatccgatgtgtcatagatcagctgagagcgccctttcaattcttcaagcagctggcgttccagcgcgattccttcgagaggaagcccggtagcggccagcgggtgagaacgcctcgtttctttgtatctcgtcacaaggatggaatccttagcgtctaaaaagagaatgcgcggtgtaatccacggattttccgccatttcatccagcgcctcaatcagcctgtcaaaaaattcacgtccccgcagatccatgacaagcgcgaccttgctcatttttgaacttgattctttcatcagctccaaaaatttcggcagcaaggaaggcggcagattgtcgacgcaaaaatagccgagatcctcaaagctttgaatggcgacggttttccccgctccagacattcccgtaatgatgacgagctgaatatcatggttttcattcatactcatctttctcccccctgcggtctttcttttatttgataagctgcggatctaaacgatagctgagcagctcgaagtccggcgtatacgtaaaggtgccgtgcaaaagcccttggcccttgatcataaaatcaaggatatgtccgtctccgggggccatcggaaggctgtggatatcttttacgtcatgccacttcagaacgccttcctctgattcagcgacatttcgccccgtgtacgagtcggcgacgaaagtaaacatcatccactctgacacgatttgttcctgttccttaataataaaggtaaacacgccttttaactgcggatttagtatataaatgcccgtctcttctctgtactctctgatgacggaatctctgacggattcgccgctttccatcttcccgccgggcgcgacccaccagccccgtctcggcttttggagaaggagaacctgatcatctgtctgcagcacacaatttgtcactctttgcacaagtacgtcacctaaccttctcaacaaatcatcgtctcttcattataccgtttcggcatgtctctcacaatgcagagacaccgacatccttttcttttatttgacagaaaacagaaaatcgcaaaaaaagggcacggatactggaatccgtgccaaagtgtattcattaaaaagggggtcaattactacattcatcttaaaacatcagtatttcacccgtgttacagcgtaattaaaacacagtaacgattcaaaaactgaacattacagtgattatttaacggttttgagcgtttcctcaagctcttccacataatgctgaacgctttgagccgcaatacttccgtcgcctgtcgccgttacgatctggcggagcgttttttcacggatgtctcccgcggcgaaaatgcctggaacttttgtttccatttgagcgtttgtttcaatgtagccttcttcatttgtgatgcccaagttttcgaacggtttagaaagcggaagcataccgatataaataaagacgccgtcagctttgaattcttcttcttctcccgtcacggtatccacaagagtaagtctgccgacttttccgtcttcctcatggatttcttttacggttttgttccatttgaagtcaattttctcattgtcaaaggcacgcgcctgaagaatgctttgcgcacgcaatttgtcacgtctgtgaacgatggtgacttttgaagcgaagcgtgtcagatagacgccttcttcaacggcggagtctccgccgccgacaacgacaagctctttatttttaaagaacgcgccgtcacaaaccgcgcagtacgatacgccgcggccgcccagttctttttcgccgggaacaccgatctttttgtattccgctccggcagaaatgacgatggcacgcgctttatattcttttgaaccggctttgaccgttttatattctttgccgtcaacgatttctttaatatcgccgtacgcatattccgcaccgaattttttcgcatgttcaaacattttattagaaagttcagggccgagaatgctttcaaaacccggatagttttcaacatcctccgtgttggccatctggccgcccggaattcctctttcgatcattaatgtggataagttcgctcgtgatgtgtaaacagcagcggtcatccccgccggacccgcgccgataatgatcacatcataaattttttcttctgacaccatgattcactccttttcgaaatggggcgcaccctatatgactaagaatccccatcaatcgtattccttacccatatcctattaaatctgaaggcaattcgctatttttttgctcatttttctgaaaaaccgtgattaggcagctcctgagcgggtatacaaataaagaaagagccttccgggatagaaggcccttgtcttattcattattgcacgacacgtcttacattgccgttgaatgctttcttccagtaagggttgctcatagaatcaatggatacaccgtgtgatgtattatcgttcaggaacgttccgttacctaagtagatgccgacgtggccgtttgttttatacgtgttgaagaatactaagtctccgcgtttcatgtcagacgcgcttactgctttacctcttccgattaatgtatctgtgtttgtgccgcttgcaggtccgaggttaacgcctgcgttagcataagcccagcgtacgaatgaagagcagtcaaaaatacggttgttaatatcagattgagtgcgtccgccgccgaacttgtacggagattgacccacaaggctcgatcctacgctgatggcgccttcaataccgcctgaatttgaaataacagatccgccgtcagaatcatctgaaccgccgctgttatgagatgatccgcctgaagtgctcttcggtttgcttgagctgtcatcagatgatgttgaaacagccgcttttttcacagttttaaccgccggtgccggctggctgtcatctttttggttttggtcttcagaagctttttgcgcttcttcctgttttttgatcagggcagccgctgcagcctgctcagctctaatgcgcttctgttctttttcagtgtcagctttttcgtttgcaagctttgatgcttcttttttcagatcagagatagcggaagccgcttttttctgaccgtttttcgcttcgtcgaaaagcttgtctttctgatcaagctgtttgttcaggtctttttgcatagactcgagtttcgcaagatcgtcttgaacttttttcagcttcacgttaagttcagcttctgcgtcttcgagtttcgctttatcctgctcctgctgtttgatcagctctttatccgcatcaacgatagaagataccgcagtcgcacgggaaatgaagtctccgaagcttgtcgcccctaaaagtacatctatgtatccttgagaaccgccgttttcctgtaaagaacgaacgcgttttttcaggatttcattgcgtttttcaatacgcgcttctgtttctttgatttcttttttcaaatcagcgatctgctttttcgttttttcgttttcagcttttttatcttcgattttattgcttgtatccaacgctttagcgttaatgtctttcagttctttttcaatcttagcctgcttgtcctgaagcttagacaattctctttcttttgcttcaaggcttgaagccacctcagattgcttgctttcaatttttgcttttttgctgtctaatgtttccgccgatgcagtttttgtaaacgggatcaaaaaactgcttgtcccgatgacggaagccaaaccaagtgttaataaactctttttcactttttctttcctcccttttactttaaacctgttctcatttggaattctattatgaacatcaaagttacgctccctcacatacccgtgaggctgatgatttttatgtatgaatctttaaatcttttaaattggtatagattatacagcacatgtaaaataaactaatctcttatgtacgagactcattataccatcatgtttcgacaatttttattacagttatatttcaatgtgattgcaaatctcatattttgcaaaataaacggtgattacggcctggtttcgattcgaaaagcaaaaaaatacgtatgaatacctcttttttcggcggtaaagttctgttttgcccctttctgataaaaaaagaaccgactctttatatagaaagaatcggttttattctaatatatcatctatttgtctgatgtatttcgaaagtgttgccggggttataccgtaaacggcggccgtttcttttttcgtcgttttttcgccgtttgcttctttccatacatatgcgatggctgcggcccacgcccgctcattctgtacggcagcggcggcgcggatgtgctgaatgacgtgaaaaacccagcagctcatgacgtcagtttttaaactgtcggcttccgctttctccagaagcttgaccgtccgatacgtgaacaacgcatcaccggaaacgcctgaagcgcctttttcaccggaaagcagcagtctgacgaaatcttgttcaaacggtgaaacggcgcgttttgccgtcagaactttttcaagctggttccgctctccttcagcgctgctgatataataggcggcaagccgctgttcaagtgaagcaggcagcggttcctgccgctccgcccaaggcgcgggccgatctgattcgggaaattcggcttcggcctttttccaaatggtttccgcaaattctgtgcggcctgtcccgtaggctgaagcggcaagccagtaataaaacgtttcgtcgccttcaaacccgcttttgtaaagagaacggagccatttataaccgagatcatgtctgccgacaagcgcaagcgtcgcccccagcttatagcgctgttcgaataaaatcggatacacattggcgagttttccgctcaattctccgactttttcatcttccctctcgtaatagcagaatacaaggaggttgcacagggcatggagattgccttcatttttctcaagcacttcgaataccgtttgtttcgcttttgtgacattgcctgagtaaaagtaagcgagcgccaggttgttgtatgcagaccaaagctcggggtaatcggccgtaatctcttcaagcatgacaaccgcttcatgaagctggccgctctcaagaagcgtttttgcccgatcctgcctgatcagcagttcatcctggtcatagagcgattcgttttcacccgcttcgccgaaatccaatagctccatcagattttcaatttcttcgctgaattcaccgtccggatcggcatctgaataagccgccgcttctttgtatgcttcctgaaagagccccaaatgcgcgaaattattcgctttaaagtaatgacactcgggcatttcttctttcaggttcaccaaaataaagtcgaacagctcatttgactgctggtagtggcccatttcagaataaatgacggccagccgggacagcatttcggaatcattcggctcgaggtggacggcccgctgaatcagtttgctggcccgctttaaattccgctctttatatgcttttaagcctttatgaaaaaaatattgtccatcctgaagcagctggacaatttgcgcgtgctttttctgttcagaagtgtgttttcccacaaatatcctccgttttatacgtattaccgtcagtagtataccataaaacggtttcacctcaatagttcaaaagacaggatcgacttcgttttttactggctggttcgaccagattttagctgtttttttcacgaggctcggctggaagaatgacgcggaaaagggttccttcgccccgcttgctctcaacctctatcgaaccgccgtgcagctctgcgattttttgggcgatggacaggccgagcccgcttcctccttcgtttctcgccttgtccgctttataaaaccgttcaaatacacgctccgcctgttcaggctccattccgattccgtcgtcggcgatttcgacagccgccgctcccggcagatctgcaattttaacggaaatgcggccgccttcaccggtaaattttacggcattgtgaatcagattcatccatacttggctgagcagcgcttcatctccgtacacatacgactcctgtaaatcaatgagaaactcaatctgtttggcggaccattcaggctcacaggtcaatatggtgcgccgcagctgtttgtcaatgcggaacggttttttttgtatcggttcggtttggcgttcgagcgcagtgagcttcagcagattttcactgatttttgataatcgttctgtttctgtttcgatgatgtgtaagtagcgcccccgctcctcatatgataaatccggttttttcagaagatgcgcgtagccctttaatgaagtgagcggggtttggatttcatgggaaacgttcgaaataaattcttgtttcagtttttccatttcactcagttccgcggcgagtgtcgacagttcatcagccaatttcgtcacgggatggttccgctcaatcttctccattttccgggaagcggccgctgtgaagttgccgctcgacatttgcttgatcgtggcggtcagcgaatcccagatcgcatgatgcctttcacgtgctgactttgaaaaaataaacattgttacgaacagcaggccgaaaacaagccaaagcgtcagaatctgctcggcgtacggcacaagcaaaatcggccatatgagaccgaatccctgaacaatcaggtgagccgccagccataagaatgcggtgacggtgagaaggatgatgatttttccagccgttctgaagatccgtttcatcctgtcaccacaaaccgatacccgagcccccgcaccgtatggatggcaaacggatagtctttttctggaaaccgttctctcagccttttaatatgcacatcaacggtacgctcgtcaccttcataatcaaagccccaaatatcttctattaattgttctcttgaaaacgtcttattcggataaccggcgagcttaaataaaagctcaaattcacgccggggcaatgtcaatcccgctccgccgccgcgcgttacagtgcgggattgcttatctaatgtgaccgttccgatggtcagcagtttttcagcggtgatccggtaccgtttcagcaatgctttgacccttgcttccagctcaagcggctcaaacggtttgacgagataatcatccgctccggaagtaaaaccttgaactttgtccagcgtttcgccttttgccgtcagcatcaaaatcggaatgtccgtaaagctgcggacggcttcactgacttcaaacccgtccattttcggcatcatcacatccagtatgatgagatctataggtgctgattcgatcagccgcaccgccgcttccccgtcttccgcttctgcgacgtcaaaaccgctctgctccatcataaggcggacaagctcacggatatggcggtcatcatccgcaaccaatatgacagccatgaaaatccctccttctgcttttttcttttcatgaatcgacatgatgtctataaaccgaattttttcattgtctcctgtatggggatacacgcttatggcttggctcttcatcgttaccgaccgtacacccgtatgaacaggaccccggctgcaaaataaaaagcagctttttcagctgcttttgattcataaagccttgctttacacagctttgttttctaagtcggcattcagcttcagctgctgctccgcaaaatcgcggtacagcgaatgggatgccattaattcatggtgtgtgccccgtccggtgatttcaccctgttcgacaaagagaagctgatctgcatccacaaccgtggataaacggtgggcgatcacaatcgtggtgcggcctttcattagaacttccagcgcctgctgcacccatttttcagattggctgtccagacttgatgtcgcttcatcaagcatcagaatgctcgggttgcgaaggagcgctctggcaatggcgatgcgctggcgctgtccgcctgacagcataatcccccgctcaccgacctcggtttcaaatttcttcggtaagtcttcaataaattgcagggcgtaggccatgtcggccgcttgcctcagttcctcatcagtcacctcgcgttttaatccgtagcagatattgtcgcggatggtgcctgacattaacgggctttcttgcgacacatagccgatgtgctcccgccatgaatcaagggaatacgtatcaatcggttcgtttccgagcaggatgctgcccgcagtcggattgtagaatcgttcaagcagcttaaataacgttgtttttccgccgccgctcggtccgacgatcgcggtgactttgccggcctcaatcgtagccgtaatgtcttttaagatggtttgatctgttttgtagccgaatgagacttgttcaagtttaatcggctgatccgcgttttcaatggcttttccggtttggatatcttcttctttttctgcaagaatatgaatcatccgttccgttgcgccgacggatttttgaagctgtgtgaaaaatgaagtgatctggcccatcggcataatgatctgaaacaaatacagaataaaggcaacgagcgcgccggctgtcaattcaccggatgacacctgcatcccgccgtacccgatgacagcgaccagcgccgccattaatacaagtgtaataagcgggcctacgagcgactgcaccttcgcttcacgcagcccgagtttaaagagtgccatgatgcctgcttttccgcgtccgtattccgcttcctcagcgtttgacgcttttacaagcctgatttccgggaggatgtggtttaataatccggtgaatctcgccgtttcatcctgtgtttcccgagaaattttaaacattttccggccgatcggcactaaaatcaccgcagccagcggcacgacgatcagcacgagcaatgtgagcttccagttcatgaaaaataagatcgtcagtgacccgataacggaaatgattccggtaataaatccgctgatattgtttgtgatcagctcttttaccaccattgtgtcattggtgacacggctgatcgtttctcccgtggcgtttttgtcaaaataagagacgggcagtttaattaatttctgccacaacaaatcacgcagtcccgagatgattttctggccgctgtagttcagggcgtaggtggcgtaggcgcttaatgcggcctgtacgataaacacggctgcgatgattccgatttgcacgcctgacagcgacgacatggaaaagccgtcaacgagctgctttgtcaacagcggaatcagcaggctgacgagcgttgtcacaatactgagagacagcgcgaaggccagcataccgtatgatggttttgtttttttgactaatgaaaagaatgagctgaatttccctttaggttttggttgtttattcggcatatgttttcctcctatatcactgtttatactataacggatgtgcatgaacggaatatgaacaaaacgtatatttttgataaaaaccaaaataaactctattagtcaatattatcaaattcatctgcctccggttgcggaaataaggaatatttaattgaatgtttaagtttgacagattaaaaacctcacggatctctccgtgaggtttgttttactaagatgctgaatggcgtttcgcaaggacgtcaagcacgtcgtccaaaggaagcgactgctcacgcagaagaacgagcaaatgatacagcaaatccgccgcttcccattttaattcttcatggtcccggtttttcgcggcgataataacctctgcggcttcttcgccgacttttttgaggattttatcgacgccttcccgaaacagatacgttgtgtaggctccgtcaggcatctccgcctgccgtttggcgattacgctttccagttcatttaagatgccgaaacgatcctgcgcatccgctttttccggagaaaagcagctgtagcttcccttatggcatgcgggtcctgaaggctccgcaagcacgacaagagcatcttgatcgcaatcatagcggatggctttcaccttttgggtattccccgacgtcgctcctttatgccacagctccccgcgtgaacggctgtaaaaccaggtttctttcgtttctatcgttttttcgtaggattcacgattcatataagccagtgtcagtacttctttgcttgccgcatcctgcacgatggcgggaatcagtccggcctcgtcaaaccgcagttcatctgcccgtttcatctcacattcaccccgtgtttcttcatataatctttcacttcttttatagatgtctctttgtaatggaaaatggaagctgcaagcgcggcgtccgcttcaccgatcgtgaaggcttcaagcatatggcgcgcgctgccggctccccctgacgcaatgacgggcaccgggactgcacgtgagacaagctgtgtgagcgtatgattaaagcctgttttctcaccgtctgcgtccatgcttgtcagcaggatttcacccgctccccggctgacggcttcttttgcccaggccgtgacttcccactcggttttctttctgccgccgtgtgtgtacactttatagcaatccgaatcttcatcatactttgcgtcaatcgccgcgacgatgcattgcgagccgaaaaaatccgctccttccgtaatcagctcggggcggaggacggccgctgtattaacggatactttatcagcgccggcgcgaagcattcgtttcatatcgcttaattgattgattccgccgccgactgtaaacggaatcgccagttttgccgcaacttgttctacgacgtctgtcatcgtcttgcggccttcgtgagaggcggaaatgtcgagaaaaacaagttcgtcagcgccctccctgtcgtaagcttcggccagctcgacaggatcgcccgcatctttcagcccgagaaattgaatgcctttgacgacgcggccttctttcacatcgagacacggaatgattcgtttcgtgatcatgcgtccttcaccccgctgagcgcttcagccaatgtaaattgttttgtatacagcgcttttccgataatcgctcccgatacgccggcgtctttgaagcgggccagtgctttgaggtcggcgactgagctgactccgcctgaagcgatgacggtttttcccgttgcttttgcgagctgaacggtgctttcgatgttcggtcctgacagcatgccgtcagttgcaatatccgtgaaaatgaaggtttccgctccttccttcgccaattcacggcccagatcggccgcccttaccgaggatgtttccagccagccttccgtcgagacatatccgttccttgcatcaagaccgatcgcgattttgccgccgtattgtttcagcatgctcttcacaaatgccggatcggaaacagccgagctgccgagaataacgcgatcaacatcttgtgataaataaccgtacacatccgcttcagaacggatcccgccgccgatctcgactttgacatcaagctgccgcgcaatgtcaagaacatgcctgtcgtttactttcctgcctgctttcgcgccgtcaagatccacgagatgaatccattcggcgccttcttgtgcaaattgcgccgccatgtctaaaggagagtcaccgtatatcgtttccttgccgtaatcgccttggatgaggcggacgcatttgccgtttctcatatcgattgccggatataatgtaaaagcgttcatttcttcaccttctgttccgctgccatttttgtaaattgcgttaagatcgccattccggccgtaccgcttttttccgggtgaaactgtgcaccgaagacattgcgtttcccgacgaccgccggaacacgaacgccgtactcagcgcttgccagaagatcgccgtcttccatcccgtctatataataggaatggacaaagtaaacgaagccttcttccgcttccgaaagcaaaggagacgtttggtgaaacgtcagccggttccagcccatatgcggcaccttcagcttgtttccttcggcatctctgtctttgagtctcacagcttttccggctaataaaccgagtccttttgcagagccgttttcggtgctttcttcgaaaatgagctgcatgccgaggcagatgccgaggagcagcttaccctcgtcaaccatacggtgtatgaattgatcaagcttcgcgctgcgtaaattgtccatggcgtcactgaatgatccgacaccggggagaataaaagcatccgctttttcaagctcttccggccggtctgatacgacatacgggacaccgacgcgttccagcgccttcgacacgctgaataaattgcccataccgtaatcaattacaccgatcatttacagcattcctttcgtagacggcacacccttgacgcgcggatcaatggatgacgcttcatcaagcgctctgccaagcgccttaaacacggcttctatcatatgatgggtattcgttccgtaatgaacgatgacgtgcagattcattctcgcttccagcgccagtttccataggaattcgtgtaccagctcggtatcaaacgttccgactttcgcttggggaaatgcaccgcgcatctcaaggtgcggccggttgctcaggtctacggcgacttgggcgagcgcttcgtccatcggtactagcgctgatccgtaccgtttgatcccttttttatcaccgagcgcctccaaaaaagcctgccctaagcagatgccgatatcttcagtcgtgtggtgatcatctatctccgtatcgccttttgcgtcaacagttaaattgaattgcccgtgctttgtgaacaaatcaagcatatgagtcataaacggcacatccgtgctgatgtcggcttttccttctccgtctatttcgaaagccagcttaatatcggtctcatttgttgttctggcgcgttccgcttttctcatcggtcattcctccgtttctcgcttcaatcgatcttgcgtgcgcttcaagcccttccagtctcgcgaaggcggaaatgctgtccgcgtgcgtttcaaatgccttccggctgtatgagatgatgctcgatttcttttgaaaatctgttacattcaacgggcttgaaaaccgcgccgttccgtttgtcggcaaaacgtgattcggtccggcaaaataatcgccgaccggttcagcgctgtatcgccctaagaaaatcgcccccgcgtgtctgatgcttccaagcaaagcctccggcgaatgcgtcatgatttctaaatgctcgggcgccagcgcattcaccgtgtccactgcatcttccatcgattccgcgatataaatgcggccgtgatccttgatcgacgcttcggcgatttctttacgcggcagcgtctgaagctgtttattcacctcatctgatacggcttcggcaagcttccgtgagtcggtgacaagcacgcttgagctgagcgtatcgtgttcggcctgtgaaagcaggtcagcggcgacttctttgggcaccgccgtatcgtctgcaaggaccacgatttcactgggcccggcaatcatgtcaatatccacaacgccgaagacttcgcgcttcgcgagtgctacaaatatattgccggggcccgtgatcttatcaacaggctgtatcgtttcggttccgtaagcgagcgcggcaatcgcctgcgcgcctcccgctttgtaaatttcctttatgccgagctcagacgccgccgccagaacgcccggcgaaaggcggccgtcttttcccggaggactgacgagaacgatccgttccactcccgcagcgagagcggggatgacattcattaaaacggaagacggataagccgccgtcccgcccggcacgtatacgcccgcggaatcgagcgccgttattttctgcccgagcatcgagccgtctttgcgatggtaaaaccacgaggattgcagctggcgttcgtgatattctttaatattggcaatcgcctgtctgatcacttccagcagctgatcatcaagcagacggtacgcctcggtgacttcctctgcactcacggccatttggttcaggctgatgccgtcaaatgtttttgtataggccaaaacggctttgtcaccgttttgtctgacgtcttcaataatccccctgacggttttccgctgctcttcggttccgctgtcgatggaacgcttcagtgagaaccgctcgcttctttttactgccgttattttcattgtgccgtttctccttccacaaccctggccagcctggccgccatttcgtcgattacatcatccttcatgcggtagctgaccggattgacgataaaacgcgatgtgatgtcacaaatatgttctgattcaacgagaccgttttcttttaatgtccgcccggttgatacgatatctacgattctgtcagcaagcccgattaaaggcgccaattcaatcgaaccgttcagcttaatgatttccacctgctcgccctgctctctgaaataacttgacgcaacattcggatatttcgtcgcaatcctcggggcgactccgttccaatccgctcctggaagccccgcaacggcgagatggcatttgctgattttcagatcgagcacctcatacacgtcacgctcttcctcaagcatgacatcctttccggcaataccggcatcagcgacgccatgctcgacataagtcgtgacatccatcggctttgccagaataaagcggagattttcttcaggaacgtcaatgatcagctttctcgattcttcaaactcctcgggcagcctgtacccggcctgccgcagcaatccggccgcttcttcgaatatccgtccttttggcattgccattgtgagtaccttacccattctgctcttcctttctggcaccgataaagtatgtgacgtttgcaaatgattttgtcatatgatcgatattttcaatgcccgccagatcctgcaggacgacttttctgcctctcgccctttcttcctccgcgaataaaatagcctgcgcccgctgctccttgctgaaaatcacggcgtccgcttcactagtttcttcctggatgccgagcgcttcaatcagcctgtcgatacggagcccgaaacccgtggcgggagcgggactgccgaaatggccgaggagattgttatagcgtccgccgcttccgatgacaaaaccgacatttgccgcatacacttcgaataaaattcccgtgtaataactcatatggcttaccatattcagatcaaggcgaatatgctcggcacatccgtaatcctcaagaatgtcccacaggtcttccagctcctgaatcaagctttgtccggagatgccgatgatctcctccgctttggcgcagatctctttcccgcctcgcaattccagaagtgtgagcagccggcttttatctattgaagaaagcggaagcgatttgacatgttccctgtatcccacgtaattcttctcaaagagaaagcgccgcagaacatccgcccgctcagcattgcccagaacctcgacaaacagctcatcagcgagtccggcatggccgatcgcgattttaaaccggtgcaatcccgcgtttttcaaagcgctggccgccagcgcaatcacctcggcgtccgcgcttgttgatccgtcgccgatcagctccgcgccgacctgttcgaattcggccggacgtccgccttcccgctcttgagcgcgatagacgcttgccgcgtaccccgctctgagcggatgattgtgtttgtgcagcttagacgccgccaccctggcaatcggtccggtcatatcaggccgaagcacaagcgttttcccgtcctgatcgagaagcttaaacagctgctgttcttcaatggctgactggacgcctactgtttcataaaattcaagggtcggcgtctccataaactgataaccccatttatcaattaaatccgtcagtgtggaacggacttttttcttggcttcgtataaaccgggcagcgtatctctcatgccatgcggtttctcaaacataaacatttgccttttacacctccgctttgtctgaaggaaaattccgaatcctttagttcgctaatatgataatatgttagcagataaaagaatgaattgcaacgcccaatgtccgcctattcttttccataaacatggctaaagaatgaacaaacctgtaaacatatcggaacgatcgaatcatattgagcagaagtgctataatacatagaatagcttcatcagaaacaagggagagtaataatgaagacgcttggaacattatgtgtgctgattctgacagccatccttgtctatctcgggtataacatctatacaaacgatattcatttgaatttttttaatcagcagtccgacgagcctgatgagaaaacaccgttaaaagggagcgcgtcaccgctgaatgtcgttctgtacagacagatggattctcccagactgtacaatggctgtgaggtgacaagccttgctatgattttgaacaatgccggatatcatgtatcaaaaaatacattggcggataaaatcaataaagttccgctcacatacagcagcgggctgaagggagatccgaatgaaggatttgccggagatatggaaaacggcccgggtttaggcgtttatcatgagccgattgataaacttgccaaagaatatgcgggaaacaaagtatacgacctgacaggaaaagacatttcttcagtgtaccgccagcttgaaaaagggcggccggtctgggtgattaccaccacatcctttaagccggttgataatatgcagacttggaatacgccgaacggaaaaatcgacattacgttcagcatgcatagcgtagccgttaccggttatgatcacgattatgtatacgttaatgatccttacggctataaaaacagaaaaacaaaccgatctgactttgaaaaagcctggaagcagatgggcagccaggccattgtgatcaagtcataaaaaaaccccgctgacgttaatcagcggggttttcccattcgttctttcatttcttcgtccgtataaatcacctgcatcggatttcctccgacaaacgccccggccgggacatctttatgcaccagcgtgccggctgatacaacggctccgctcccgatggtgacgccgggcagaatcgttgtgtttgccccgatcattacctcgtcaccgattgtgacatcaccggtccggtactcatgtattaaatattcatgagccaaaatcgtcgtattgtagccgatgatactgttttttccgacagtgattttttcgggaaacatgatatccggcatcaccatcagcgcaaatgacgtctgttttccgacattcattttcaaaaaggttcgatacagccagtttttcacgcttaaaaacggcgtataccttgcgatctgaatgatgatgaaatttttcatcaccttcagaaaggagaccgtctgataaacatgccacaatgaatttgcacctgaaaccggatggcggtctgtttttctcacggattacttcactccggtgatgtgcaataaatcactcattttctcgagcatataatcgggttcataggcggaaagcgtctgtgcgcctttaatcgtccacgcgacgccggctgttttcgtgccggcgttttttcccgccatgacatcgtgataattgtcaccgaccattatggcttccgacggattgcacccaagccggctgagagcaagccgcacaggctcggggtcaggcttcggatgctttacatcatcaagcgtgacgacagtatcgaaaaacgccccgatgcctgtcagcttcaatcccatagtcactgtatccctcagctttgtggtgacaatcccgagctgatagcccgcttttttcaattcatccagcgtttcataaaccgtttcgtactccgtgacgagctcatcgtgcttttcatggttgaatgctctgtacatgctgatcatctcatcgcacttttcagcattaatgcctgaaaacgtttcatacagaggcgggccgataaacggaagcacatcttcccttttaaactgccccgggcaataatgatcaagcgtatgaaggtaagaagcgataatcagttcattcgtgtcaatcagcgtgccgtcgagatcaaataaagtggcggttacacgtttatcagtcatcttatgtcctttccgatttcagacgtcagtccttgtcggcataccgctgatcggcataccccttcatgcgtctgaaaatcattaaaataattgtgagaacaatcagcacaatggaaatgacctgcgcgatccgaagctggctcgtaagcatcaggctgtccgtccgcattccctcaataaagtatctgccgatcgaataccagatcacatacgtcaaaaacagattgcccctgcgcaggttcacgcggcggagcagaagcagaatcacgacgcccgcaaaactccacagcgattcatacaaaaacgtcgggtgataatattgtccgtctatgtacatctgattaatgatgaaatccggaagatgcagactttccaaaaatgaccggctgaccgcttcaccgtgagcctcctggttgataaagttcccccagcgcccgatggcctggccgagcagaatactcggcgcggcaatatccgccagcttccagaatgagatgcctcttacttttgaaaagacgattcccgtcgcgatcgcgccgatcaatccgccgtgaatcgcgatgccgcctttccaggttttaatgatttccccggggtgttccgagtaatagctccactcgaaaagcacatagtatgcccgtgcgcaaatgattgcgatcgggatggcgaaaagaacaagatcaataaaaatgtcctttttcagcccccgcttttcactctccctcatggccatccaaagccctaataacgcacccgcgccgataatgatcccgtaccagtgcacggataaaggcccgagctgcaaggcaatcggattgattggtgttcctgcttcgttcatattattgccaactcctattcgtcttgttcgccgtcttcaatgacatccgccagcttattcgtaaattgctcggcagcatttaagcccatccgcttcaatctgaagttcatcgccgcaacttcgataataacggcgagatttcgcccagggcggactggaatggtcagttttgtaatttccgtatcaatgattttcattttttcttcttcaagtccgagacggtcgtattgcttcccttgctcccaaagctcaaggtccatgacgattgtaattcttttattgcttctgacggcgcccgctccgaacagcgtcatgacatttataatgccgagacccctgatttcgagcagatgctcaatcagatcaggcgcgttcccgacaagggtatcctgatcctcctgcctgatttcaacgcagtcatccgcgacaagacgatggcctcgtttgacaagctccagcgccgtttcacttttaccgacgccgctttttcccgtaatgagcacgccgacgccgtatatatccacaagcacgccgtgaatggccgttgtcggcgcgagacggctctcaagaaaattcgtcagcctgcttgacagcctggttgttttcagaggggatctgagcacaggcacgccgttttgctcggaagcttctacaagctccggcgggatcggcatatctctggaaagtatgatagccggcgtcacatcggtgcacagcgatttcatccgctgtttcttatcttcctcgggaagctgatcgaaaaatgacagctccgtttttcctaaaagctgcacccgttctctcgggtaatatgtaaaataaccggcgatttcaataccgggccgtgataaatcactcatcgtaatcgggcggttaatcccttcttctccgctgatcaattctaaatggaactgctccattacgtctttggtccgaacctttgccaagatatgttcctcctgttctgggatgttccgagctttgaacagttatattttatcactttactgtctgaaccaaaacagatttatacaattccggcataactggtctagataactagtctgaaaaggagtaaaataaaactaacaactaaccagaaaggcgtgttttaaagtggctgaaagcttgttaatcagcggtgcggacatcgtaacagaagaagaaatcatccgaaacggttttctcggtataaaggacggcatcatttcttacgcggggaaaacaagaccgcaagaaacgtatgagaaggaatggaaggcgcccgcgggttcgtatgcgcttcccggaatgattgatattcatattcacggcggatacggcgcagatacgatggatgctgatgttgcagctcttgatacaatgtccgcccggctgcccgaagaaggaacaacctcttttttagcgacaacgatcacacaacagcacgaaaacattgaaaaagcgctcgtcaacgccaaaaaatgggcgtcttcctcaccgcaggcccaaaaaggcgctgagttgatcggcattcatttagaaggaccgtttgtctctccgagaaaggcgggagcacagccgaaacaatggattactcctgctgatgccgggctctttcagaaatgggagcggctctcgggagggctgatcaaaatcgtgacgcttgcgccggaagaagatcctgatttcagcctgatccgttatttaaaagaccaaaacatcatcccgtcaatgggacacacagacgcgggagccgagcttttacaaaaagcggcggatgccggggcggtgcatatgacgcacctcttcaatgccatgagctcctttcatcatcgtgagccggggggcatcggtacggctctcgcctgcggccgcatcacggcggagctgatcactgacggcattcattcccatcctttggccgttaagcttgcctatttggcgaaaggaagcaaaaacctgatcatgataacagactccatgcgggcaaaagggcttaaggacggagaatacgaattcggcggacaaaaagtcaccgttcgcggggacacggcgcttctctctgacgggacgctggccggttccattttaaaaatgaatgaaggcgcggcgctcatgcgcaggtttacaaactgctcatggctgaatatagcaaatatgacatcggcaaatgcggcccgccgcctcggcatattcgaccgtaaaggaagcatcgccgaaggaaaagacgccgacgttgttctgacggacggacagtgcggcgtgctggccacgatttgccgcggaaacaccgcatatatctcaagggaggctgattggacatgaacgttatcacatgcagacattatgaagaattaagtgaaaaagccgcagcgattatcgctgaaacagtgaaacaaaagccggatgccgttctcggccttgcgacgggaggcacccctgaaggcgtatacaaagaacttgtgcggatgcaccgctcagaagacttgtcattccgaaatgtcacgacgatcaaccttgatgaatacgccgggctttctcccgaggacaaaaacagctatcattattatatgaatacacatttttttgcacatatcgatagccgaaaggaccgccgctttctccctgacggacgggcagacgatcttgatgccgaatgcggacgatatgaccgattgattcaaacactcggcggagcggatatacagcttttaggcatcggacacaacggccatatcggctttaatgaacccgggacgccatttgaatcccgaacccatgtcgttgagctgaatgaagagacaagacaggcgaatgcgcggtactttccgtcaattgatcaagtccctgtaaaagccctgacaatggggatcgggacgattttgtccggcaaacggattttgatcatggcatccggaaaaagcaaggcccaagcggtgaagcagcttctggacgggcgcatcagcgaagcattccccgcctccgccctgcacgcgcatccggatgtgacggtcttgattgatgaaaaggctgcgggcggcgattgaaaggatttgacctatgcagattgataaacaatctccgattccgatttactttcagattatggaacaattaaaaacacaaatcaaaaacggcgagctggaagcggatgcgctgcttccgtcggagcgggaatacgccgaacaattcggcatcagccgaatgacggtgcgccaggcgctttccaatctggtgaatgaaggatttttatacaggcagaaaggccggggaacgttcgtcagcaaactgaagatggaacagccgcttcaagggctgacaagctttacggaagatatgagaagccggggcatgaagccggggagcagacttgccgaataccagctgattcaggcgacggaagaattatcttctatcctgggatgcggctatccggcaacgcttcataaaatcatccgcgtccggctggcaaatgatatcccgatggcgattgaggcctcgtacatcccgtttgacaaggcgggaaaactggacgcctcccattttcaatcatccatgtatgagcatattgaagcgtacaatcagatgccgatctcacgggcaaaacaagagcttgaaccgggagccgcttccgaggaagaagctgagctgctcggtatccagcccggcgcccccgtcctctatatcaagcggaccacttatctgcaggacggcactgcctttgagcacgtcaaatccgcctacagaggcgaccgctacacattcgtgcactatatggacagggtgaaatgaaacatctccaaccgttacgggttggagatgtttttttgatctgccattttcaaatcaagccggtgaatgttctctatgactctgtcaaaacggagaggctggggttctggtatctatttttataaagaaaagagtaataaaatgctaccctctgttttggacaatatacggaacctgctttgaaatcagcagcagcggttctttgtttttatgagccagtgaaaacatgattgcgccttcaatcatcgagttgattgtcaccccgagcttctccgcttcctcttgttcaaacccatgctcaagaaattttgccgcaaacacatccgtccacttcttgaacacctcaacacatgtgcatcttaacgtttcattgatcagagcggtctcacccgccagcaatccaaccggcacgccctcaatattctgcggatcattaaactgttcagccgttacatgaataaagtgctgaatcgcttctatagggtccgcgaattgagacatactattctgtatttgcttttcaacgcatcttcccgtatgtttgatcgccgcaatggcgagttctgcttttccgtttggaaagtgatgatacacagaccccctgggtgctccgctctcttttataatttgattcaaaccagtcgcatggtatccctgaatctgaaaaagatatgcagaggtttgaataattctttcttttgtcccggttttactgttcattatgtttcctcctgcatattacgaaaaccaatcgattttagtatagaaaagggacataaaaaagtcaaaagcacttatcacagcagggcgccgccatttacgcacagtaaaaatcctgctgaccgtcagattttcttctgagcgatcagcaggctgtatgttttcgttatgggtttgaagcatgcctgaaatcaaactgatccggagccgggcgatacggcgtatttcccgttttgaacatccacagcggtgatattgttttgccgttgtacgggtccttcacgacggtgtaccagtaataaacggaatcaggatgcaggccgtcccagacccaatttgcggtttttccgctttttacgtgttttttatgaccgagcagttcgttcgtatagacgttgcattcaaaataatcggtcgctacccttttcctcttcggctgtaaatccatttctgctgagaattcgtctttatcagcgaacagatcggtgtcatagtaattgatgtcatccgtgtacggcgagtaggagaacatgtgaacctgattggcggcctgatcgaattgcatcatgcgcataaagccctgccccccttccggaccgtcctggtagtcggtcagaatttggtggacgaggcggtccggttttccgtccccgtcatcgtcaagcgcatcggtttttttcatggcgttatggtaatggccgcttaataccatcgccacattgcgattcggcttgacgacttttcgatagatcgtttccccgatcgggcttcgatttccgctcacaagcaagtactcatgaaagcataagatggcggttcggtccggataccgcttcagcacttgattgatccagtcaatctcttgttccgcaatgccccagcccatataaatcataataaaatcgttcccgcttgccgacagcagatcataatgcccgcggttatttttgtatgatccgccgtaatgcatgttctgttcaaaccggcggctcccgaagaaatccccgaatgttcggtatgtgccgtctttatggccgacgtcgtgattgcctgcaagcactccgtacggaatccccgccttgtcaagcgtccgcatggagtgatcggcgtttttccactgtttcatcaccattgaatcatcgacgatatcaccggtatgaaagacatatttaatattgtgcttttccttattttctttgatccactccgtcattttgtcaaaaatgtgcgggtgcccttgtgcgtaatactgtgtatccgacatccagacaaacgtgtaattgcctttcgccggtatttgatcctgcacgatgacattcatttttgagtttttcaccacatccgctgcggaaacggcggcttttaatgtaaacggctttttatctttggcaagaacgctgtccgcctcctgccagcggcttgtccggtaattccaaatatacatggttacctttcggccagggagagagcttcctttccagaccgcctcggccagatccgtttcgtcgatagacgggtcaacggagacttcgaaccggtgataaggaaaacgctccatactttccgccgaaacggtttttccgtcatttgccgagatgcggttcatttccggcagggtaaacggcatttcattttcttttatgcccctcggcggttccgttaatgaggcgtgtttatacactttcacgctgcccggattccgcgcggtataacggaagccgcgataaaatgatacattcatgtcatccttcgtcgggtcttttacccggacggacagctttgctttgtgggcgccgattttttgatcggcaagctccggctggttcggctcctcccgtttgatatggaaggtgcggacggacgttgtttcatttccggcaaggtctgccgcaatgatagtaagggtatgttttccgggcttgagatcggctgatgacgtgtgatgcgggagcgtaatgctttctccgtccaaaaacgctttgacctcttccactttgctccatttgtcacggatgtccgcatttagctcaacattacctttcagcgccgcgccttctttgatacccgggacaatcttcggccccgtattgtccacccgcacagattggctcagctgttcctcaccgtcgctaacaaaaatatggtgatagccttcagaaagcttcgccgtgttccacggcagcagccgtgacgtaaacaaatgatccggcaggctgaatgagaaggtcttctgctgattcgcccgcctgccgtcaccgataaacagctgctcagccggatccgtcttcccgtctttgatcaccgttccgtccgaaagcaccagacgggcatgtttcacgacaaaatcatcccgattctctcccgtgtcatacggagaaacctttgagcccgaacggatggatactttctgtgttttgccccctttttgcagcagacgttccggaaggagaaccgagtacgttctgtaacggtgagacggatcgtcaaaaatgtgcagcacctcattttccattatgacggtgttttgaaaataaagattcgttttccgggcatcgaaggcgaaatagacctctttttccagcgccggccgggtctcctgccgcttgccgtcaatccacagcttgatcttatcggcgctgacgtcggaagtcgctttgagcagataggtgccggatatcgtatcttcgggttcaacattcattctgagtccgtgtgatttgctcgtctgttcaatgtcaatcattttgacgggcgtttttgcttcattttctccatcactggctgcgatataatactcaagctgatcctggccgagcagctccggggaataaagaatgtgatggtataagctgtcgttgcggtctttttcggccagaattcgtttgaatggttttttctcattggtccggtaataaaacgcggctgttttgacaaggtttttgtcttttatgtcagcctttaattcaatgctttcagcgggccggacgggctttctgtctgtaaggtcttcgatgaccggtttttccttgtcgggttttatcacccttttctgctgcgggatctgcgcctgaaaaacagagcccggtgacggcttatgctcgctcgtggagatcctcagcaattctcccgttccgttcagcggatatttgtacagcaaagaagtcagccggcggaaagcgtgtttccggtattgcgccgaggcgatatccttgccggtatttgccgacagcaccaccgtacgcgggcggccgttggacattccgtccgtcccttcgatgacggcgagatgttctccctccttcaggcgtgtcccgtaatagcggttgaaatcatctatcgtcagttctgatgcggcgcgtctcagccaaaacacgtaagtcccgcctgacggaatgacggtatcttctttcggcctccatatcatgtctgattccggcccttccttcggatagcggtagcggatgtgatagtctttaaaatgaatgggtctgtccgtcgtgttatacacctcgataaattcataggcatcagcgccgtcttcatttttcgtatcaaccgcaagctccgtaatcatcagctcgggaatatgattcaaatcggcttgatagccgtccagcttcagccgctttttctccgattccgcccgctgtctgccgttggtgaaaacgaggtaatattccaattctccattccagatatcccgctttgaaacctgggccgtaaacagccggattgcgcctggcgcgggctccatcggcaccattttaaacccaagctcattgctttgtttataaaaaagaaacgccgaaaacgcttgatagtcagcattccgtacatgagcctgtatgaacaggtttcttttcatttccgcctttacttcgatttggggaggattctccagaagcggtatgtaatgaggcggctgtccgaattcctgctgattcacggggattgccgattctttgcgcgccgcatccgcagaaggactcacacaaagcaaaccaatcagaaaaaagagcgtcatcacaagtttcatctcattacctccctatacattatgttgcgtcaggaggctgccgcttatgtaaatcacacataaaaaagctgccctctcgggacagctcgttttttacctttttctaagcggctccaatatgcctttttggatcagcaagtggaaaacggacagcacgacagacgcccaaatggcggtgccgaacccatcaatctgaaagctgtctcccatcaaggctgcggtcatcattaacgtaatggcgttgatgacaaacagaaagaggccgagggtcacaaccgtgacgggcaatgtcaatatgacgatgatcggcttgatcagcacatttaacacagaaagaatcacactggcgatgacagccgctccgatactgctgatatggacggaatcaaaatatcccgcgataacgattaataataaagcatttactaaaatgctgactgcccatttgatcatttatttcaaatctccttctaaaggtacaacaaaacaccagataatatatacaatcggcacgattccgctcgtgacaagcgctaatacaacggttataatgcgcaaaagcgacgcatccatattgatgtactccgccaaaccgccgacaacgccggcgattttacggtttttttctgaacggtaaagtcttttcatccaatcacctctgagtatgcttgagcttaatggctcctgttaacgattctgagaaaatcgagagatgctgatcatgaccttgatttgatgccagcatcagttctttttgaatggtatcattcttttcctttaaaatttccgcatcaatcagctcatggctgagagagccgagattgcttttcagctccgctttcaccgccgaatcatcaggcagagcgatatccacgtttccggtcgtcgttttcgtgtagatggagcggcagtgcggcgctgtcacggtaagcatgatattgccgttaaagctttgaacgtcaatggattcactcgatccgcgcaaatcaatcaagccgttgatcgtttccgcttcaatcgcgccgcattgatgtccggccagcttgatttgtccgttagccgtttccgccgacgctttatcagccgtcaaatgagagaatgacagaacgccgtttgtcgttttcgccgagaattcttttacatgtaaatgttcccctctgatcggtccgttaaacagcttcactcttatcttatcgtactctttctggggaacataaagcgtgacattggttttcatcgttttcttttccgtgcggacaaaaaacttattgcccttcacttcacactcaatgtgctgaagaaatgcggtgcgcgccgcctcctgactgtccgcccggtatactttcgcatggcactccgctctgatatcttcatccgcccacggcacgatattgacgctgccgtttgcaatctgcatatcaatggccgagaattcactgtctttaaattgaaaaatatgctgcacttcgtgtgcgtggccgaaattcagatcaagatccgcttccttcacttttttgacggcagaatcaatccagtcgaacagcttcgccccgagcgacggcttttggcttccttttgctccgctttcgaaatcttctgcaggttcctggacctccgcagataatgcggtgatctgctcttctttttctttatattcatgatccagtttttcaatgagcgtcagtgcttcctgcgccgttagcatgccgtcttccacaagctttaaaatccgttctttctcctgtttcatacaaaacgcctcccccgacttttcttacacctggcgtaacaccttaattccctgcacgatattccaaatgaccattccgatgaggatcagaaaataaacagctgctcctgttatcataacaaaaacgggcaccatactctccccctgagccgtaatcaatccgccgacaacacccgcggtcacaatcagcaatcccgcaaacggaatgatatgggaaatcagagctcgcatggcatgccgcttcgtctctttttcatcgacgacaaagtaagccacaatcggaagaatgagcggcgcgagaaacacgctgaaataacagattgatgcgataatcgcttgatttcggttcaataaaaacactccctgtgccttgatgtaaaaacccttccttatacatacgtatgacgaatgggcgggtttcattttcatgctaaggacatgcttcgttatacgtaatttttgatttcagagatttcactatagaatcttttccccgaaccgattacaatatgtaacaaagcctgaccgtatgcaaggaggacatacaaatggagaaagatcccgaaaacgcccaagtaacggaagagagtctgcgaaatttaattcgcgaacagaaaagaatgaacagcgaaatgctggctgaattggaacagatcaaggcagcccctcttcccatttcccatgatatccaatatataaaagtgctgctggacagcagcagcacccatattctgcaggacttaatgcatttaagcagacagcttccccaacagaaaaaaacctgtaacacaacagcccaaaaccggtgagttttgggctgtttttattgatctattatgtggctgccgtttctttttcagccagcaatgttttcatccgttttttatcacgttccattaccggtttcagatagcggcccgtatatgattctttcacttcgacaacttcttcaggcgtcccggaggctacgatcgtgccgccgcccgctccgccttcaggtcccaggtcgacgatgtagtccgccgttttaatgatgtcgagattgtgttcaatgaccaaaacggtatcaccgttatcgacgagtctttgaagcacaaccaatagccttgcgatatcatcaacgtggaggcctgtcgtcggttcgtccagaatatacagcgtccggcctgtggatcgcttatgcagttcggaagcaagcttaacgcgctgcgcttctccgcctgacagcgtcgtcgccggctggccaagcgtcacatacccgagtccgacatcggcaagcgtttgaagcttgcgtttgattttcgggatattttcaaagaaagacagagcatcttccaccgtcatatccagaacgtcagaaatgctttttcctttgtatgtgacctccagcgtctcccggttgtaacgtttgccgtggcacacttcacacgggacgtacacgtcaggaaggaaatgcatctcaattttgataatgccgtcgccgcggcaggcctcacagcgcccgccttttacattaaaactgaaccggccttttttatagcctcgcacctttgcttcatttgtctgcgcgaatacatcgcggatatcatcaaacacacccgtgtaagttgaaggatttgatctcggtgtccggccgatcggcgcctggtcgatgtcgatcaccttatcaaggtggtcaaggcctttgatttctttatggcttcccggtttcgctttggctttatgaagcttttgcgcaagcgccttatgcagaatttcattcacaagcgtgctttttccggaaccggacacacctgtcaccgccgtaaaagtgccgagcgggaatttggcgttcgcttttttcaggttgttttctgaagcgcctttgatttcaatgaaccggccgtcaggctttcttctctccggaggcatcgggatgaattgagcccctgacaaatagcgtccggtcagagagtccgcatcattcatcacttcttcaggcgtccccgccgatatgacgcggccgccgtgaatgccggcgcccgggccgatatctatcaaataatcggcagccatcatcgtatcttcatcatgctcaacgacaatcagtgtgttgccgagatccctcatgtttttcagcgcgctgatcagacggtcattgtcacgctggtgaaggccgatggacggctcatcaagaatatacaggacgccagacaaacgagagccgatctgcgtcgcaagcctgatgcgctgggcttctccgcctgacagcgttcccgccgcccggctcagcgtcagataatcaagacccactttatctaagaagctgagccgctctacaatctctcttaaaattaaatcggcaatctgcatatctttctcagacagcgtcaggtttttgaaaaattcaagcgcgtcgccgacagaaagttcggtaatggttccgatatgacgcccgttgaccaaaacggcaagcgcttctttcttcagccggtagcctttgcacgtcgggcacgatttctgtgacatgtactgctccatctgttcacggatataatcggagcttgtctctttataccttctctcaatattgcgcagcacgccttcaaattcaatttcattttcgcgcacttgtccgaaatcattctcgtatttaaagtagatccgttcattgccgctgccgtacagcactttatcaagctgatgcttcggcaggtctttgaccggagtctccatatcaatgccgtaatggcggcagaccgcctgaagcagctgcggataatattgtgaactgatcggcgtccacggcgcgatggcgtgttcctttaatgacagctcgggattggggatgacgagctcaggatccacttccagcttcaagccgagaccgtcgcaagtcggacaggcgccgaacgggctgttaaacgaaaacagccggggttcaagctccccgatagaaaaaccgcacagcggacaggcgtgatgctcgctgaacatcagctcctcctgaccgatgacatctatcatgacacggccttcccctaaacggagcgcggtttccagcgagtcggaaagccgggcggcaaccccttccttgacgacaatccggtcaatgactacttcaatggaatgctttttgtttttttcaagttcaatatcgtcggaaagctcggccatttctccgtcaatccgcacccttacgtaaccttgctttctgatttggtcaagcactttgacatgggcgccttttctgcctgagatgataggcgcaagcacttgaagcttcgtccgctccggatattcaagaatccggtcaaccatctgttcaatcgtttgcgacgtaatttcaatgccgtgctccgggcagtgcggcttcccgactctcgcgtacagcagccggagataatcataaatctccgttaccgttccgacggttgaccgcggattgcggcttgtcgttttctggtcaatgctgatcgccggggaaagcccttcgatcgcatcaacgtccggcttatccatctgccctaaaaattggcgcgcataggcagaaagcgattcaacataccgcctctgtccttccgcgtaaatggtgtcaaaggcaagggatgattttcccgatccggacagccccgtcacgacgacgagctgatcccgcggaatcgttacatcaatgttttttaaattgtgcgcccttgcgcctttcacctcgatccggtcaattgccatgtgttcatcatccttccgctttaagctctaacagtaaatcacgaagctctgccgcccgctcgaaatcaagcgctctggccgcttctttcatttcgtgctccatttgctcaacgactttctggcgttctttcttcgtcatcttcgccagtttaggcgcggcttttgttttatattcttctttatcctcagcggcctgcgtcgcgcggatcacatcgcggatttccttattgatcgtttgcggcgtaatgccgtgaatttcgttaaagcgctcctgctgttcccggcggcgcttcgtttcattaatcgcgatttccatcgaattcgtgattttatcggcatacatgatgacgcggccttccgcgtttcgcgccgcccgtccgatcgtctgaatcagcgaacgttcagaacggaggaagccttctttatccgcatcgagaatggcgacaagtgacacttccggaatatcaagcccttccctcagcaggttgatgccgattaacacatcatgttttccgaggcggaggtcacggatgatttcaatccgttcaagcgtcttaatctcggaatgcagataattgaccttgatgccgatttccttgagataatcggtcagatcctctgacatttttttcgttaaagtcgtcacgagaacgcgttcattccgttcaatcctcgcctgaatctcaccgatcagatcatcaatctgtccttcgatcggccggacgtcaatgaggggatcgaggagtcccgtcggtctgatgatctgctcgatcatttccggcgtatgctcaatttcatacggtcccggagtcgccgacacgtacacgatattgtgcatgtgtttctcaaattcctcgaatcggagcggacggttgtcaagcgctgacggcaggcggaacccgtgatcgacaagcacctgttttctcgcctggtcaccgttgaacatgccgcgcacctgcggaatcgtcacatgtgattcatcaacgacaatcataaaatcgtccggaaaataatcaagcagcgtatacggcgtagagcccggcggacggagtgtcaaatgtcttgaatagttctcgatccctgagcaaaaacccatttcccgcatcatttcaagatcatatctcgtccgctgctcaagccgctgcgcttcaaggagcttgccgttttcgtgcatcactttcaagcgctcctcaagctcctgttcaatattcagaatcgctttttccatcttttccgcccgggtgacgaagtgggaagccgggaaaattgcgacatggtcacggtcgccgagaatttctccggtcaaagcgtcgacctctctgatccgctcaatttcatctccgaaaaattccactctgatacaatgttcgtcacgggaagccgggaagatttccacaacgtctccgcgcacgcggaacgtcccgcgctgaaagtcgatatcattgcgggcatactggatatccacaagctttctcagcagctcgttccgctcaatctccatttccggtctgagcgacacaaccatctcccggtattcttcaggtgaaccgagaccgtatatgcatgacacactcgcgataataatgacatctctccgttcaaacagagaggatgtcgcggagtgtctcagtttatcaatttcatcattaatgcttgcgtctttctctataaaagtatccgtttgaggcacgtacgcctccggctgatagtaatcgtaatagctgacaaaatattcgacagcattgttcgggaaaaactccttaaactcgctgtacagctgtccggcaagggttttgttatgggcaatgaccagtgtcggtttattcacttctttaatcagattggacacggtaaaggttttgcccgtccctgtcgcacccaggagagtctggtgttttctgccttcctgtatgcctttgacaagcttctcaatcgcttgcggctgatctccctggggctgatatttcgagactaactcaaaacgatctttcacaaaaaagcctccgtttctttacgaaatcttcctattgatatagtaacacaatgacgggcaaaatcactaaaaatacgaactaaagttcgatggtttatttttaccaagtcaatttttgtataaaaaacctgcttttatggcgtaaaagcaggcattctatttcatattcaccatgtcaggcattgtctttctttttgtctgcttcttttttggccatgtacagccctccggccaccagcgatacgacatccaatccaacgataaaatacgtttcggtgtaaccctttaaataggatgcgaaaagcagtgcggctgtgagagcgatcgccacatagtggttaaacgtgacgcgcgtaaaaaggacgaccagcataaaagggaaacataatgcaaaaacggcttttgtaatcacaaaaaccctcctcgggaattcttcatctcatctgattatagtaaaaaatgaagaatcggacaatcgttcccctgctatcacaataccctttttcagcagtcttcaatcatctgtcaaaaaaattgtgaatataaatccattgaaccattaaccagatgaatcgaattacctttcttcagccgaaaggatgagaaggtttaggtctttgtatctttgacagtttcttcctccctctttacaatgtaatgatagtgtttactatcattttcttggatgaagaaaaaaagggggtcataccgcatgtattcagtgcgatttcaaaaagcggaagaatcgagccgctctgcaggagcaaaaggaatgaacctgattaaactgacaaaaaacgggctgcccgttcccggcggtttcatcattcagacgaatgccctgacacgttttatggaagacaacgggcttcaagcagatcaggaacagatggagcgcgccattatgaacggcacgttttcaaaagagcttcgggaggaactgaccgcgtcgttttatgaattgagagaatcatacgcctctgtcgccgtacgttcctcctccgcgtccgaagatcttgaaggggcttctttcgcgggccagtacgaaacctatttaaatatcaaaacagaagaagagtttctcggaaaagtgaaagaatgctgggcttccttcttctcggcgcgggtcagcggttataaagagaaaatgaacaatgacaccgcagaaccattaatgggcgttgtcgtgcaagggcttatcaattccgaggtttcaggagtcattttcagccgaaaccccgtcacacacgatgacggagaactgatgatcagcgcgagctacggtctcggagaagcaatcgtctccggcagcgtgacgcccgacacatttatcgtcaataaagacacatttcagattgaaaaagaaatcggcttaaaagaaatgtatatcgtttctaaagacgaaggcgtgacggaaaaagagacgtccgctgacatgagaaaccgcttctgccttgatgacgagagcgtcaaagagcttgccatgctgacgataaagacggaagaactgtacggttatcccgtggatctcgaattcggatttgccgaaaataagctgtatctgcttcaggccaggccgattacaacgatcgtgcaggatcagaaagcggcagacgaagaacgggaatttattatgacgccccaggatcagaaagatttttggctcaatatggaggccaatatagaaggccccgtcagcccgttattcgcctcactcattgtgccggctttggaatacggcctcaaagagagcacgaaggcattccctgtaatgggcatcgaaatcgagcgtgtcaaacttcatcagggacgtgttttttccagacagcataagacggacgacaagctgcccgcagaacagttagaagcgcttttccccgtcttggctgaccgcatgtacaatattattcaggaaacctttctgcctttttatcaaaagctggacgaactggcgcatacagaccatacgccggagactgcccttgatgcgttccgaaacctgcaagacttctatttaaaaggatacgcagaacatttcaatattgtctttccgcaggttgcgttaaacatgatactggaatccatgtacggacaggttgagaaagaaaacacctcccttctgtacgaaatgctggctggcgtcatgaataagtcattggagaccgacagacagctgtggctgctttccggacaagtaaaagacagccctgagctgcggcgcgtctttacggtttctcatgccgatgagctgcatcagacacttctgcaatcaaatgagggaaaacgctttctcgaacaagtcggtgaatttttacaggaatacggctggagatccgtgaaaagtcatgatctgattgaagaaacttgggcggaaaacccttatttcgctttagccaacattcagaactatgtccggaacggatacgattttgacagtgagtttcataaaacgatagaaaaacgaaaacagctctacgccgactttatggatagaattgaagatgacggcttccgggagacgtttgaccgctattatcagtggacattgtcttcatccgttatcaaagatgatcaccatttttatattgatgcgatgctggacgccaaagcgcgcctttgccttctgaaaatcggcgagctgcttcaaaaacaaggcgtaatcgatgatcgggaggatatgtggtacttatacagcgatgaagtcgagaaagcgctggtgtcgccggttccgatgcaggaaaaagccgctgaacgaaaacagctcttccagcaatatcaattgcttgaagcccccgcttatctcggaactccgacttcggaacagctgaaaacggctgaacagattaccggctccatcacagaagatgaaaaaaacactgaacatcaaatttacggacttgcggcgtcaagcggaatcgcaagcggcccggtgaaagtcattcgtgacgcaagtgaattttcccgtttttcaacaggagacgtgcttgtctgcaaaatgacgacaccgctgtggaccagtctgttccaggatgcaaaggccgtcattacggacacgggcggcatcctgtcacatgcggcgatcatcgcgagggaatacgggctcccggccgttctcggcacacgtgccgcgactgacaggctcaacgacggagatatcgtcacggtggacgggacaaacggcaagattacgattgtcaaacgcgcttcatgctaggtttccctctttattgacgggcagggcgggtgtatacttgtcctgccagtatttacgcgaggtgaaacatgttgagaacgacgaacaagagaattattgacgccgcgatgaatctgatcatccaaaaaggataccgcgcagcgacaacaaaagaaatcgcagaaaaagcaaaagtaagcgaagcaacgattttccgtaattttaaaaacaaacaaggattaatgaaagccatgattgaacagcagacgccggttccggaaagcatgatcactaaggcggaaggcgatctgtatgaggatcttcttcatttcgccgcgacccttctgcagcaattggaacaaaaaaaagaagtgttccgcatctgcctgcgcgaaccggaactattcgaagacgtcctgcaggatattgtcgtatatccgcaatccgtgaaaaagcatttaatcgtttactttagagctgacaaagaaaaatatgataagccccggcagtgaagaagctaatgcagacgtctttatgacgatgattttcggttattttatacaccggctgcagctggggaaaagagtcatcactctctctgaggaaacgatgctgaaacacagcactgagattttcatgaaaggcattaccggccggtcattttccggctccaaggaggatgaaggatgggttcaaagaaagaatgggcgctgatcgtttcgcttttgctgggagccatactcgttcccatcaattctacgatgatcgcagtcgccctttcatccatttcccgctcattcagcgaatcaattgccagcatcacatgggtagtgaccgtgtatttaatcgtgatggccgtgacacagcccattgccggcaaactcggtgatatgtacggaaacaaaaaaatgtatttatggggcgtcggcctttttctcatcgcatcattggggtgcgccctctcgccaagtcttttcttattgattttcttccgggcgcttcaggctgccggcggcgctttgcttacgccaaacagcatcgccatcatccgccatgtcgtgtctgaaaaacggcttccgaaagtattcggctttttcggcctcggtgccgggctgggtgcggctctcggtccgtttatcggctctcttttaattgagagcttcagctggcattcgatcttttgggtcaacattccgtttcttgcaatcgcactcgtgacggcattagtgatgtttcctaaatataaagaagaaacgtctgacgctccgcttgatatcatcgggtccgttttgcttgccggaagcattgtatctattattcttctgacgaaaaatgaaagctctttgggctattgggtgtacgcactgctcattctggtatttgttccgctatttttcaggcgggagctgcgcacgaaacatccgattattgattttgatctgtttaaaaacacgacctttacgagcgccaatctgtcggttctgttaagcaatttaatgatgtacgccgtgttattgattatgccgctctttatgaccggccacttcagcatgaatacatcgcacagcggcatggcgctgtcagtcttttctgttttcatgtccgccagcaactggggcggagctcagctgcatcagaaatggggcgcgcgaagaatgatttttctgtccttcgggctgatggccgtagccaatctcttatttctgcttttggtttattcccattccgttccgtttcttatggcatcgcttattgtcggaggcatcgcgtcaggtgcggggctgacgagcatgcaggtatcttctcttgcgacggtagaaccgggcatgtccggcatcgcatccgggattttctccaccttccgttatttcggaagcattatttcttcagcactgatcggtttaatctccgggtttcatattctgtttatcatattgatcggagtttctgtgatcggcttgttcgtatcgcttggtatcaagtccggggaaaccgttcagacgaaaaaaagccattcggcataacgaaaaaggttccgtaagcatctgctttccggaaccttttccagttttccttcttatttttctctctcaaagtgtcaccgcaatgccgtttgctctatgagaatctttgatttacaagagaaaaggggaatgtaaatggctgagagttccgatcaagttcggcgctgacatcgtaatccggccgtaaaaaaagcccggccgccgtgttgttagcggcaccaggctttttatatgtgatttttcataattaataaaactgaaagcttattatttccaatgttttttcttaatttttttcataattctccttactaaaacctacctaaaacaattattgaatattacttttataattaagcaaaattaagtaacaatcattgaaggattctcagactgataaaatttattttaaatataatatttcaaaacacattcaaactgtacaaagaaaagaaagtctaaatttttatttttgtgagattctatctatagaaggcacggttttgatcctccttctaaagttgagtcgcgtcactttagtagaatcataccgtggcttcccttgtcaaaaggcacagttcttttttacaccactacttgagactttaacgtttctctcatttgaattaattcaaaatagaattaatgggggagattacccccgtatttccaggcgatccaggtgggtggcctggtaaatattttgagtctctgtatctttaacaatagtatttacaatatcattaggataccgattcaaaaaaaaatgttctcctttaaacttatgaaatttcacgtttccttcaacaacttcactccatttatgcatttcattgatatgagtcgaaaaatcgctatccgcataaaaaacgcttactccacaacttattttttctgctttgggctgaaacttataattgtccaaaattataaaatctgctcgcaaaatcggaagaaacatatccataatctcttttgtataaaactcctctggtattcccccatattgttccacctttgtcaagaaagtttcattagtcatattttcaatgtcttctctcttttcaaaaatatgtggagcatctcgcccagaaaaaaacagatgccttggttccttagttcccatttgcttaagtttataatatatctcataagtcaataaggctcccatgctgtgtccaaatataacatattcatcgtcatattctaattgttcacttattcttttggcgatatcttcacttgcttcaccaacagactggtaacaaggctctgtgaatcgagttcctcttccagccaattcacatatacacaattcatatctatccggcagtagttttttccattcataatatgcatttaccgacgctccagcatatggaataggaaatacttttattttatttatttcactcactcctatgttcaacttgagcccactatcattactatataaacctataagtattcaagatacatttaattgtacttctctatctctcgctgctctgccagcaacaaattcaccatatcactatagctattcataccgtctgtctgattatttgccttcagatatatatcatttacatttcttgaaatacttgaaataaaaccctcatacttatcccggtactgctcattttgttctatatcatgctgcaccgccttggacagactggacattatatcagacgcctgatctggatccactttctttagctcagatatagaataatcaaatgctagaaaaaaaccactgtaaagtatcattggatcatcctgctgcttacatgccagatatgctataaaatttgcctcatcctcatgcatgaaaccactctgatgtgccaattcatgtgccatagtagcaggcaccaagaaaacgggcacattaacattgatattggattcataagtaaaagggacaaagataccatttatccctgcatgcgacattagctttgacatcacaactggttttggtgttgagtataaagaatgctccaaaataggatattcctttgataacatttgcatcgagaacactgcgtgttgtgcataataatcaaaaacctctggtacttgagccaaaagatcagtgtccgctaacttttcccttgccaatcccatttcaacggcaagcgacttactcaatttgaccagttcctccttgctgtagttctcttctttatattcggtataagacaaaaaagaatatctgtaatagtttattccacccaaaatagtataacaaaaatatatcacgctacagatcgtaacgattcctagagcaccacgataaactaccatcctacgtacacctttactcatgataaccttgcgcacataataaacgatataaaatagaaaaagtaacacaaccaacacgacgagccattcactaacagaaaacttgacccaagaaggtacaaatcctactatttttgacaataacggatatacagacctactgtatttttccgcccaatcctgatggttctgcgcgtatattgtcagtatgtaagctataactccaagtgaaatcaacggtaatctcttaagtaaaagcttttttataatgtactccccctatccaataaatatcagatgtacgccatgtaacctagtcatatcatttctttatttcaacatacttttcctcataaaaatcatgcttattagaaaaaacatattgattcataaaatctataggaagtacttcataagcccagtaggtaccattaggtctattacttgaaataacttgtcgggcgatttcagcagccactgtacccgttaactctgaactcgtttccatttgtaaattcaatctgcacctaacattctttccatttttcactcctgtagcatcaatgactaaagctatccattcctctttaggttgctcctctaaacgaatgtctagttttttcagggcttcttcaaccgaagactcaagttgcatttgataaaattgcattgctaaacgaaaaatattatcatttgctgctatattgtaccagtggagttcttgtaccgaactaacttccagaatatcaatgatctcttggcttaaatacggtttcttatagacagggacatccacttcaggtacaaattctttcttcatcatatttatattttccgttttaacacaatgatcactccaataagaatctgtttttccaattacactatggccactcattaatatatctgagatagaagttttcgtataatgttccgcaccaccaatataacaattcacatacttcgtttcgtctaataaatgatttattactcgttttaatagcagacctgtaattccaggacaaaaaccagctcctatgtaatttacaccgttagctttaagctctatttgctcctgactcaataataaagcattggaagcatcgacatattttgctcctacttccatagctgcctgagcaactctatctttaattataaattcaggccctgcacaattaatgacaaccgtacaatcagtacagaacgcaatcaagttctcccagtcagaaacatccaggaattggtagttaaaattattaaggttcattaatgctgtaggttcacgccgctgtccgcccttaacaataaagtctttacataagttcttacagatgacttcaccgatcattccgccacacccaacaactgcgatttgctccatccgtacgacacccctttcatcttatacaagatttaaaatacaagactagttatacctttctctattaaaagatcattattatgtctactcaacatactcaatgcataaaatctttgttttgcttccattaatttatgatacgtgccgtgttcttcaattttcccattattcaataagacaatttcatcatatccactaagaattgattcatccagcctatgagtaatggaaattctcgtaatgccctgcatttcacttaacatacactcaaggtcactagctgtttgattgtccaacgctgaagtcgcctcgtccataagtaatataggtgattttctcaggagtgctcttgctatagaaattctctgtttttccccacctgaaaaatggattccattttctccacataatacatcaaagccgcctctgtcatgaatcaatttctgtaacatactcttctttattacttgctcaaactcatctgtgtcacattcacgaaacaatttaatattttgttcaatcgtatcatcaaagataaaacagtcctgatgaataaaactaacattttggaaaatggactgatcacttattttctcaagatcaaccccgtcatacctgatatttccttcatacccatcataaaacccagtcaacatctttaataaggttgtctttccactcccacttgttcctacaatggcataagactttccatattcaaattcaaaattaatatcatctaaaatttttttcccatctacgcttaacgaaagcccatttagagaaattttattactgaatttagggatatcaattctttgagtttgatccgtttttgcctctccaattttattgaaattcattaataaagcccgactggccttccttttggtaaaaccggttatgagtctattaatgggaactgttacacaatttaacaattgaataaaagccataatctctcctactgtaatttctcctttcattagctgctgagtacccacaataaatatgactacagcaacaagaaaagttgaaatatcagtaagtgacataatgagtgacaacagattttcgtataccatttttgctttttcctgcttgttcgcctttgcctttgccctttcaaaaatctccttttcgatgttaaagctcttaacaacctgatttccagacaatatatctttaatgaaagatacataatttttattttgctcagccacttcaccttgtgctttttgcatacgattattaaatatactcgaaactgcaagtggaatgatacaagtgagtaatatactcaatgcaaggaatgaattaatgataaacatcgcaagcactccacctacaagcatagctagctgaacaaatatttccacggtcccttttatataatcgttttgaattatcgttatatcatttgacaatcgtgatatgtaggttccattactctccttgttgaaacttctcatatctaaccgcaaaatattttcaacaagggtatttttcaggtttaacgttgccctttttgtatataaatttttaacagcataccccacatacattcccactgcacctaaaggcaataaaataacggaaacagtagtcaccttaatgatattgtcaatatctttattaatagaataatcaataaacttttgtagtataattgccaatgcaataaacagaatagatgtcatgataccaagtaagcaggacaaaataaataagcctatattctttttgtatatgctttttgaaattttttcattcatactataagcccccttcttgtttctaatttcatttagagcatgtctaatttacactccaattgtttattgctagatcatgtgcatatttcagatatgttgggtgggaccgcgagcatatgcacatgatctggcatcatatgtctttttatgacccctccacccgcatagcgggtggttttacgggtaagatacaacattaaatattcttcatgacatcatgaaggagctcttcttcaattgtaatgcctgtaatgcgagcaattagagtactattttgaatgtaaaagtgcatgctaactccaaaatcttcagactctataatctgtgtttgtaaaaacatcttctcaagtgatatgtcatctctacttgcaaacttatcaaggactccctgataattaatgattggaatgcgatgggacatttcattaaaaccgtacttttgtgctataagaaacaacttttctgtaattgcagattgattaatactcgatttttctgatgttgataaaagctgtttttgcgttttacttttcctatcataaattgaataatctaaatttaaagttagccccaacatttccttattgaattcatctctgttatgtgtcaaaacagaaacagggatgttatttaattcttcaggtaagtcactatacataagccttgatataaattctactgctgtattaatgggttgttcgctaaatttctgatattgtaactcatttagttttacatgaatttctgtagacctcttagtgtctcgtcgagagaccaaatcagctgattgtttagcagcttcaatatacttttccatgttagactcttgagcatctggaatttccagttcgtcaactttctttttaatcattttgcaatattctatgaaagaatagttatagggagtggtaagtctgttgttcaaagtttcatgaagcataaccttaaacaaatcttgtgagactccatcccatattaaatgatgaattgcactaagtactaagcaatgatctgcatctatttctacgattaaaaatctagataacagcttatcatcagttagaaaactcatttcattcacaatttctttaaattgttctgcagataattctaaggttcctttcactactggaatttcccactcatctgaataatcgtattcttctaaataggtcattttttgatttaatttcgttcttaatgccccatgcctggaaattattcctctgagtgataaagaagcgttctctgccgttccttctattgttatgatttcagtaataatttctgtatccggtcgcaagaagtcctcatgtcctgtcaatacaggacattctaaagtagaacgtgttttaatatagttatctccataataattcaactgtttttgtatcatgcactttagatcgccatcacggttatcaccaattaatgtttcatctaatggcatttttactgttccttttctggttaaacacgtttcgacaacatccttaattgctctttcatatgccaataccaatgtttgagcatcctcgtcagtatacaatccagtatcatatatgatgtcaaattcaagttgcccatttaaaacagccccatttagagacaatcccattcctgatgaatttttttctgacatacttcttcctaatggcattcccgacatggatattccttcaattctgtctatctcgttatccaattctccaagataattgaatgttattgctgcgctcatctcaagtccgctatgctcaccaagatatctcaaaactccatatccaattccatgattagggacctgtttcaatgtttgttttgtctccaaaatgctttcttcaacagtatcttttgtctccaaaataataggatatacacttgtaaaccaaccaactgtacgatcgatggcgatctctctatctattgtctctctcccgtgaccctccatttctatggttaggtacttagagtttctccattcttttactgcaatggtcagcgatgccagtaacaagtcgtttatttctgttttatatgtttttccagcttcgagcaacagctttttcgtcgtttcagagtccactttcactactttatttttatattgaccacttgctgtttgtgtactcttgaatgtctcagtactatttgatttatccgatatatttttccagtatgctatttcatctgaaagcacttcactcttagcatattgtgttaaagcattcgcccattccttgtacgaagccgttttcattggcagcgtgattttacctgtctcttgtatttgtcgatatccactaaataaatcctccagcagaattctccatgatacaccgtctatgaccagatgatgtacacaaattagtaaatgatctccactgtctgaatggaacagccctacttttactagaggcccggtggctaggtctatgcttgcctgtaatttatcgctggcatactctatctctttcgatacatcttgcacttttgtataatctttttcataccaatcatatagcttgctttcctctgtagacagcgtgatttgacgttgtccgtcatatacatttcttaaagcgtcatgatgtttaatgatttcagtaattgctgtctttaaactaggtatgtcaaatggctcatcacttcttaacattaaggcctgattataatgattaggtacgacgtgattcttattgaaaaattctagttgtataggggttaatggactttccccattgatttctccctgttcgtatacttgatttacttctcccatttgaatattttccccaatctttcttggggtctgctgatacattaatgcggcgaaagaaagcttataacctttttcccgtaacttcgaaacggccttaatcgctttaatagaatctccgccaagttcaaagaaactgtcttctattccgactggagatattcctaagatttcttcaaatatgtccgtaatgactttctctgttttagttcttggtggcatatattcctgtcctgctaatgcatttagttctggcagtgcttttgcatccagcttcccatttgaagtcagtggcaaggcatcaatctgcatcataaagccaggtaacatatactcaggcagtttgtctctcaaatcatttttgatttcagacatatccagttgctgctcttgatttgtcgggatcaggtaggcacatatactcttgtcaccgcctacttccaatgcaacaacggctacatcagatatacccggctgattccttagaacgctctcgatctcgtacaactcgatccgatatcctcggattttaacctgttcatctattcttcccaggtattcgatctccccgttaggcagccatctcgccaaatctcctgagcggtataacttcccttcgccatatggattgtcgataaacttctgcgctgttaattcaggctgatttagatatcctttggctactccgtctccggcgatgcatagctcaccaggaatgcctacaccacataactccatctcattcagtatatagagctgcatattggcaatgggatgtccgattcctacacttaaacccttatctttttcgctggaatagacatagtcacagcatcctacggtagtctctgtagggccatattcgttatgaatcttgacgctgtctcctaatagcttctgcgttttccatgccgtatctgtggttaactcttctccaccgacaatcagcgtttctaaattcggtacatctacgccgtctgcataagtttccagcatttttaaatgggacggagtaagtttaaggaaagttaccctgttatctttgaatgctgcacgtaacctttcctccgtgtctcctccctttaatagaagagatccaccactaatcagcggtaagaacaaggacgttacggaaaggtcgaaacttaagcttgtcattaataccgtcgtacaagcttccttctggtattcttgatctgcatacgacaagtaatgatccagattgcctcgtgtcaccgccacacctttgggctttcctgtcgttcctgatgtgtaaatcacataggctatgtcacttttttcaacagcacacgctggatttgtctccttctcacccagatcttcaagattcatcgagatgaatgggacttccgtttccatagtcttctctcttgttaaaatgaccttgggtgctgcatcgtttaagatatgctctattcgttccttcggtgttgctggatcaatcgggacataggcggctccactctttagcacgcccaaaatgccaatgatcgtttccgcttccagggtagtcatgatggccactcgatcattgggctgaacacctaacgaaatcagttcccatgccaatgcattggccttgcggttgacttctccataacgaagtactcccgtttcgtattcgattaccgtcttctcgggtgtctgttctgcatgtttctcgaatcgttccactgccgtatgatgctgtgcatactccgtatgggtattattgaaaaccgttagtattcgttgttgttctacctcactgaccatgtgtagttcagacaatttcatatcagggttagcaatcactctatccagcaataccttaaaatgctccagtatgacctgtgctgaagtctcggtaaataaatcactgcaatataccagatctaaagcgtacccctcttcatacgctgtagcttgtaaatccaaatcaaatttggcatcaatgaaaggaatgcccaacatgtctacttgggcttcgcccatcgcaagatggatatcttcgtcattctgcatggtaaacatcacgtcaaacagcggattgcgtgacagatcacggcgtacttctacttcctctaccaattcttcaaatgggtattcctgattctcatacgcgtttaaggccagctcttttatctcgcttaaaaactccaggaacgttttctcgccccttggatatcctctcattgccagcgtattgacaaacatgcctgcgatcgtctcggtgtcctgatgcaccctgccggagataggtgttcctaccactatatcttgttgcctgctgtatttatgcagttctatcataaatacagccagtaaggtcatgtaatctgtcgttccattttgtttatttatattttcaattccaactttttgttctttactaagttgaacagacacttgtgctcctttgtaactttgggttttcggacgtggatagtccgtcaccaaatccaaaaccggtgcctcttctttaaatacttctttccaataatccctctgactctccagatttctagcacgcatccattcactataatctttgtattggagttcaagtggttgtaactcttcaccgttatacaatcgtgagaaatcttcgattaatagattgagcgtcttatgatcggaaataatatggtgcatatcaaatagtaaaatatatttgttccgatttctttctttcactactttaaaacgcatgagtggtgcttttccgatgtcaaacgggcgtacgaattgctccatatcggcttcactgcagctgtcagtttcttcatattccactgggtagaatacctcgtctgcaatgacttgatatgctccttcttcggtcattacaaaacttgttcgcagcgactcatgacgcttaatcagacgatctatggcttgttgtattttttctaaatcaaggttacccgttacttctagcgctgacgccatgttatatgcagtactgttgccttccatctgatccagaataaacaatcgtttctgtgtagaggatgctggataagcttctctctgttctgcttgtggtattggactatattcgccttctcccgcggcctcaatctttctcgacaacatgacaggagttggtgaactaaatatatctttgactggcaaacgaatccctgtcttcttctcgatggcattaatggctgccgtcgcttttaacgaatgtcctcccagttcaaagaaactatcctctatgccgactggagatattcctaagatttcttcaaatatgtccgtaatgactttctctgttttagttcttggtggcatatattcctgtcctgctaatgcatttggttctggcagtgcttttgcatccagcttcccatttggagtcagtggcaaggcagcaatctgcatcataaagccaggtaacatatactcaggcagtttgtctctcaaatcatttttgatttcagacatatccagttgctgctcttgatttgtcgggatcaggtaggcacatatactcttgtcaccgcctacttccaatgcaacaacggctacatcagatatacccggctgattccttagaacgctctcgatctcgtacaactcgatccgatatcctcggattttaacctgttcatctattcttcccaggtattccatctctccgttaggcagccatctcgccaaatctccagagcggtataacttcccttcgccatatggattgtcgataaacttctccgctgttaattcaggctggtttagatagcctttggctactccgtctcctgcgatgcatagctcaccaggaacgcctacaccacataactccatctcattcagtatatagagctgcatattggcaatgggatgtccgattcctacacttaaacccttatctttttcgctggaatagacatagtcacagcatcctacagtagtctctgtagggccatattcgttatggatcttgacgctttcacccaatagcttctgcgttttccacgccgtatctgtggtgaactcctctccaccgacaatcagcgtttctaaattcggcacatctacgccgtctgcataggtttccagcatttttaaatgtgacggggtaagcttcaggaaggttaccctgttatcttttaaagctgcacgtaacctttcctccgtatctcctccctttaatagaagagatccaccactaatcagcggtaagaacaaggacgttacggagaggtcgaaacttaagcttgtcattaataccgtcgtacaagcttccttctggtactctttatctgcatacgacaagtaatgatccaagttacctcgtgtaaccgccacgcctttgggctttcctgtcgttcctgatgtgtaaatcacataggctatgtcacttttttcaacagcacacgctggatttgtctccttctcacccagatcttcaagattcatcgagatgaatgggacttccgtttccatagtcttctctcttgttaaaatgaccttgggtgctgcatcgtttaagatatgctctattcgttccttcggagtcgctggatcaatcgggacataggaagctccactctttagcacgcctaaaatgccaatgatcgtttccgctcccagtgaagccatgatggccactctatcattgggctggacacctaacgaaatcagttcccatgccaatgcattggcctttcggttgacttctccataacgaagtactcccgtttcgtattcgattaccgtcttctcgggtgtctgttccgcatgtttctcgaatcgttctactgccgtattattctgtgcatactccgtatgggtatcattgaaaaccgttagtattcgttgttgttctacctcactgaccatgtgtagttcagacaatttcatatcagggttagcaatcactctatccagcaataccttaaaatgctccagtatgacctgtgctgaagtctcggtaaataaatcactgcaatataccagatctaaagcgtacccctcttcatacgctgtagcttgtaaatccaaatcaaatttggcatcaatgaaaggaatgcccagcatctctacctgtgcttcgcccatcgcaagatggatttcctcgttattctgcatggtaaacatcacgtcaaacagcggattgcgtgacagatcacggcgtacttctacttcctctaccaattcttcaaacgggtattcttgattctcatatgcattcaatgccaactctttgatctcgcttaaaaattctaagaacgttttttcagcccttggataccctctcattgccagcgtattgacaaacatgccggctattgtctcggtgtcctgatgcactcggcctgagatgggtgttcctaccacgatatcttgttgcctgctgtatttatgcagttctatcataaatacagccagtaaggtcatgtaatctgtcgttccctgttgtttatttatattttgaatgccagctttctgctcttggctaagctgaacagacacttgggctcctttgtagctttggattttgggacgtggatagtccgtcaccaaatccaaaaccggtgcctcttctttgaatacttctttccaatagtttctctgactctccaggtttctgccacgcatccattcactataatccttgtattggatttcaagtggttgtaattcttcaccgttatacaatcgtgagaaatcttcgattaatatatttagcgtctgatgatcggaaataatatggtgcatatcaaatagtaaaatatagttgttctgatttctttctttgactactttaaaacgcatgagcggtgctgttccgatgtcaaacgggcgtacaaattgttccatgtcagcgtcactgcagctgtcggtctcttcatattccactgggtagaatacctcgtctgcaatgacttgatatgctccttcttcggtcattacaaaacttgttcgcagcgactcatgacgcttaatcagacgatctatggcttgttgtattttttctaaatcaaggttacccgttacttctagcgctgacgccatgttatatgctgtactactgccttccatctgatccagaataaacaatcgtttctgtgtagaggatgctggataagcttctctctgttctgcttgtggtattggactatattcaccttctcccgcggcctcaatctttctcgccaacatggaaggagttggtgaactaaatatctcttttactggcaaacgaattcctgtcttcttctcgatggcattaatggctgccgtcgcttttaacgaatgtccacccagttcaaagaaactatcctctatgccgactggagatattcctaagatttcttcaaatacatctacgattgcctgctccgtcttattacttggtggtacgtagttcaaactttctaacatatctggctctggcagcctagttttatccagcttcccatttatggttagtggaaattcatcgatctggatcataaaggcaggaatcatatactctgttacttcttctcttaccgcttctttaatttggggtatacttagttcctgccccttttctgcaatgagatatgcacagagaatatcatcatttccaacttcttttacaataacgacagcatctgcaatattactctgctttcttaatacactttcaatttcacctaactctatcctgtaaccacggactttcacttgttcatcatctattcgacctaaatactctatatttccatctggctgccaacgtgctaaatctcctgtacggtacagttttccttcaccgaagggattcttaataaacttcttatctgtcaattctggctgatttaaataacctcttgctaaaccatctcctgcaatacacaactcaccaggtattccaatcccgcatagctccatttcatttagaagatatacctttgtatttgcaatcggacgtccaatggaaattgaagtagagtctgtattcactctaaaactagttgcatttacagtagactccgtaggcccatatgtgttaagcacttctactctttccgcccatttttttaagctttctagactacctgcctctccacctgactccagcaaacgaagcgtcggtaatgcgtcaacacacaacccgtctattaacttaggtgtcaatgaagctgttgtaacattatttcgatcgatatatttttgtagttgctccatatcataggttaaatgttttggtacaatgcataatgccgcaccattgcatagtgcagggaagatatctcccaccgcttggtcaaaagatatatttgcaaattgcagcaccgtatccttgtcgcttagtgcaaatgtctcctgatatgtgacccacatattgaccacatttcgatgttcaattaaaactcctttaggatttccagttgtacccgaggtgtagatacaatacactaaatcattagacctgttaacgtgcaaaagattgtccgtttcattagcataattattctcatcttctaaatctaatactggtatctctaccttccctggcagcttattcttatacgtcaatacaatctttggactactgtcctccagcatatagtgaattctattatctggatattcaggattgatgggtacataagctccccctgccttgatgatggctaatatccctacaatcatttccatgctgcgttctgtcactagagccactagatcgtttggagccactcctaaatcccgaagagttcgcgccaactgatttgctctttcattcagctcggcatatgtcatcttattatcatcaaatttaagtgcaatatttcctgctgttttctctacctgattctcaaataagctgacagctgtttgttctcgagagtattctacattcgttgcattgaaatcaaccaagatcttctcttgttctctgagatcaagcatatgcagatctttaagctttttgcctggatgtgttatggcttcctcaagcagcgttacataatgccttgccatatattcaatcgtttcttgtttgaataaatctgtgcaatactcaaaatctatctcatacccttctggcatacattcaaccagaacggataagtcaaactttgagacatttcttttaatgaatgcactttttccgcccaataggccttgcatttccgtcggttttttcttttcttttaatccgaacataaaatcaaaaattggatttcttgagagatctcttttctcctctacggcttcaactaaatcttcaaattggtattcttggttatcataagcctgcagacacttctccttcacagctaatatcaaatgctcaaaggtctcatccggactaacttctcccttgatcaccagagtattgacaaacatccccaacatacccttagtatctgcatgaactcggcctgacacggtagttcctacaataatatccttttggcgactatatttggctaataataaaatgaacacagatagggtaaccataaattcagtagcaccatgctttagggctagatttttaacccctgagcttaatggctcctttacctttgctacaacattgtctcccctgaaagactggatttgaggacggaggaaatccgtcttcaaatccaccctagcaatttcaccagcgaattccctcttccaatactcttcctgttttgagatgtcataaaaattctgccatacactgaaatctttatactgaacacggttagaatttttattcataagttctcctcttattcataatcagttccatcattttcataaaattcgttcacttgttgcagtataactggcaggctttctccatcacatataatgtgatgaatatcaacaaatagataggaggccgttgttgtcttcattaatttcacacgcatcaacggtgcttcggataaaacaaacggttgtataaatttatcgtattctgtttgtatatctatttcgtccacttcgctgtagtctattaaaacccttgcgtctggagaaatcgtttgaataggctcaccgtccacaacatggaaactagttcgcaagatttcttcttgctttaacagcttatccaaagccttctgtaatctttctttatctagcggttcttcataagcataaacgtccgatacgttgtagttaatattaggtccggtcatctcgtccagaagatagagtcgtttctgagctgaacttgtagggtagtattcagctgctgaagcttgttctattgccacaaacatctcgctctcaatcgactcgatatttcccgctatctgctcgggcgtaccaaaagtaaaaacatctctaattgacaatcttactcctatggccttctccaattcattgcacaagagcactgctttcagtgacgatccccctagatcaaagaagctatcagttacactgactttttcaatatctagaatgttctcaaatgcctgcacgatcagagtttcatattcatttcgtggtgcaatatattcctttgacttatactgtggctgtggtaatgaggctttgtcaagtttcccattacttgtaagtggaatcgcatcaaccgaaataatatgtgcaggcaccatgtaatctggtaatactttacttaacttgatcttaacgtccttttcttctatttctgtctcagttattacataggcacacaggaatttctcattccttttgtcttctcgcactatgactacagcttcatttatgccttcaagctccaataaacggctttctacttctcgtggttcaatacgatatcctctgatttttgcttggtcatccatccgtccaatatattcaatgtttccgttaggtaaccaacgtgccaaatcacctgtccgatacatctttccggatccaaatgggttgtgtacaaacttctcgtctgtcaggtcttgtcgatttaaatatccttgagatacaccctcacctgttatacataactcacctggagctccaattccacaaagttcatttccatttaatatataaatctttgatgttggaagtgccttccctatgtcactaattccgctctcgatggcttccgcatcaatatcacgataagtggcatatactgtggtttctgttggaccgtacatatttaccagacgacaatgcctattattctcatgccatttcttcaaatgtgctggataaagcgcctctcctgcaaaaataacatatcgcaaactatttatggtttgtcctgtcgttgcatcgatcaacgcataaaatggtgaaggtacctggcataagatggttaccgcttctttttgtagcagctctccgaaggcatatccatcttttactgtatcctcagaaggtattacaagctttgctccattcaatagacttccgaatatttcccaaaccgaaacatcaaaacaataagaatggaattgaacccaaatatcattttcatataaatcaagcttaaacttgtcattcttgagtaatcgcactacatttacatgctgaaccataacaccttttggccggcccgtcgtacctgaggtataaataacatacatcaaatcacttgagtgatttacatgaacaaggttactgcattccatttgataatttgcctcatcatgaagatgcatgacaggaatgtcaacttcaggttcttttgtactgcataatacgacctttggtttacagtcatttatgatataattaattctttcctctggataagatggatcaaccggtacgtaagctgctccagcctttaaaatagcgtatatacccaccaccatctccaaacacttctctgttgagatcaccacaaagtcattgggttgaatgttatagtcctcacgaagctttcttgccagagcattcgcccgttcatttaattgtgcataggtcatctgttgtccattaaatgtgatggctatactattaggtattctggcggcctgctcttcaagtaactgcacaatcgtcatattttgagggaattctgcatccgtcatattgaactcacccaatatttttgcttcttcgtacagatctaccatggcaatctcctgcagcttcttttccggagacattaaaactccttcaattaatgttaagaagtgttttgccatgtactcgatcgtttctggtttgaataagtctgtagaatattcaaaatcaatcttatagccttctgaatcacttatcatggttaaggtaagatcaaatttagaaatactaccttcaacggattcccttgttccaatatgaatacgatccgaataactctctctctcatcgtcctgcaatacaaacatcacatcaaatactgggtttcttgagaaatctctctttactcccactgcttcaactaaatcctcgaactgataatccttgttatcgtatgcctgtaaacatttctcttttgtacgtaataatacatcctcaaatgtatcatcagcgcacacattccctttgattgccagagtgtttacaaacatgcccaacatattttgggtatccgtatggtttcggcccgatattggcgttcctactataatttcttcctgtcgactgtattttcctaacatagagaaaaaggtggataacaacaccataaactccgttgcaccatacttcttcgctaactcttttactttaatactcgttttttcttctacctgtgttcggaaattagcacctctaaagctttgtttatgagggcgtggataatccatgattaaatccaggactggtatatcaccggagaattctttcttccagtacgctgcctgttctgtgatatctctagcattttgccaagcagaaaagtctttatactgtactcgtggtgttaacaattctcttccttcatataactcttgtattttgtaaagcataactggcatgcttcctgcatcacataaaatatggtgaatatccaggaataaatatgaatcacttggagtattcagtatttttgcacgcattagtggtgattttgacaggtcaaatggttggacgaaagtattatattcatcttggatatactgtgaatctgctgtctttacttcactgtgctccagcacaattcttgcatctgaagaaattttttgaattggttcaccattcacgatatggaaacttgtccttaaaatttcctcatgctctactaattgatccaatgccctctgaagtcgctcattgtctggtttaattttaagcttgattactaaaggaatattataagttttaccagggcctgttagttggtccaaaagataaagtctcttttgagctgaacttatagaatagctttctgcttctgctatttctggtatttcttcaaacgtattctcctttgagttttttatttgttctgcaatattttttggtgtaactaaatcaaaaatttctctaagtggtaaccttacccctgtgctcttctctaattcattacacagccggattacattaagcgagtatccacccaaatcaaagaaattgtcatttacacttactctttccataccaagtacatgttcaaatgcctctactaccaatttttccgtctgggtctttggtgcctcataaccccttatcatcttagtttcttcaataaactgttccgggttcggcaataatttacgatctactttaccatttgcagatagtggaatctcatctacctgtatgaattgtgccgggatcatataatcaggcagatgtttggctaactctctttttatttctgccaattctacggtctcatctgcaacaata

(The sequence listing continues in the following parts.)
